(19) United States
(12) Patent Application Publication
(10) Pub. No.: US 2024/0150805 A1
(43) Pub. Date: May 9, 2024

(54) Glycosylated Opioids

(71) Applicant: River Stone Biotech ApS, Copenhagen (DE)

(72) Inventors: Jens Houghton-Larsen, Copenhagen (DE); Rubini Kannangara, Copenhagen (DE); Esben Halkjaer Hansen, Copenhagen (DE); Evan Chaberski, Copenhagen (DE); Laura Tatjer-Recordá, Copenhagen (DE)

(21) Appl. No.: 18/288,012

(22) PCT Filed: May 5, 2022
(86) PCT No.: PCT/EP2022/062130

§ 371 Date: Oct. 23, 2023

(30) Foreign Application Priority Data
May 7, 2021 (EP) 21172832.4

(51) Int. Cl. C12P 19/60; C12N 9/10; C12N 15/52

(52) U.S. Cl. CPC C12P 19/60; C12N 9/1051; C12N 15/52; C12Y 204/01262

(57) ABSTRACT

The present invention relate to a method for producing an oripavine glycoside and/or nororipavine glycoside comprising providing (i) a oripavine acceptor and/or nororipavine acceptor, (ii) a glycosyl donor, and (iii) a glycosyl transferase (UGT), and contacting the oripavine acceptor and/or nororipavine acceptor, the glycosyl donor, and the UGT at conditions allowing the UGT to transfer a glycosyl moiety from the glycosyl donor to the oripavine acceptor and/or nororipavine acceptor and thereby produce the oripavine glycoside and/or nororipavine glycoside.

### FIELD OF THE INVENTION

[0001] The present invention relates to methods for producing oripavine glycosides and/or nororipavine glycosides and to genetically modified host cells producing such glycosides. Also included are cultures of the genetically modified host cell and methods for cultivating such cultures into fermentation compositions and isolating produced oripavine glycosides and/or nororipavine glycosides therefrom in the formation of compositions comprising oripavine glycosides and/or nororipavine glycosides. The invention also relates to novel oripavine glycosides and/or nororipavine glycosides.

### BACKGROUND OF THE INVENTION

[0002] Enzymatic preparation of opioids such as benzylisoquinoline alkaloids (BIA's) using enzymes either in vitro or recombinantly in genetically modified host cells expressing such enzymes is known in the art. Examples are US2019100781, WO2019/165551 and WO2021/069714.

[0003] However, the turnover of enzymatic conversion of substrates/precursors into a desired opioid (both the rates and amounts) is determined by enzymatic kinetics of the multitude of enzymes involved in the production of a desired opioid, the equilibria of all the steps including transport along with negative product feed back on growth or reaction rates which can significantly impede the yields of opioids using such methods. Other drawbacks in current technology includes product toxicity or other product properties impeding growth of production cultures.

[0004] In addition, side effects of currently available opioids such as morphine and the like, such as addictions, toxicity and/or psychedelic effects call for the development of new opioids having improved properties for use in therapeutic regimes.

### SUMMARY OF THE INVENTION

[0005] The present invention provides improvements offering solutions to certain drawbacks of producing opioids using the known technology, particularly pronounced when producing the opioid precursors thebaine, northebaine, oripavine and/or nororipavine, precursors that are essential to many higher opioids. The invention also provides glycosyl transferases, which surprisingly acts to glycosylate opioids both in vitro and in vivo and thereby circumvent drawbacks of the known technology and moreover which also integrate and work in genetically modified host cells to produce therein opioid glycosides. The inventors have also found that glycosylation of these opioids not only produce hitherto unknown opioid glycosides, which possesses interesting properties, but in vivo expression of glycosyltransferases also offers a range of hitherto unknown advantages in processes of producing these in genetically modified cell factories, such as yeast, including but not limited, to avoiding futile ATP consuming cycle of repeated uptake (By proton symport) and excretion (possibly by ATP consuming efflux pumps) during the oripavine demethylation step; secretion and separation of nororipavine glycosides the cells which prevents (i) intracellular nororipavine degradation; (ii) acidification of the yeast cytosol and the stress associated with repeated cycles of excretion and proton driven uptake of Nororipavine; (iii) inhibition of oripavine uptake by unwanted competitive uptake of extracellular nororipavine; (iv) product inhibition of the oripavine demethylase enzyme by presence of high concentrations of nororipavine; and (v) increase in propagation and biomass production of genetically modified cell factories glycosylating oripavine and/or nororipavine. Accordingly, in a first aspect this invention provides a method for producing an oripavine and/or nororipavine glycoside comprising providing (i) a oripavine and/or nororipavine acceptor, (ii) a glycosyl donor, and (iii) a glycosyl transferase (UGT), and contacting the oripavine and/or nororipavine acceptor, the glycosyl donor, and the UGT at conditions allowing the UGT to transfer a glycosyl moiety from the glycosyl donor to the oripavine and/or nororipavine acceptor and thereby produce the oripavine and/or nororipavine glycoside.

[0006] In a further aspect the invention provides a glycoside comprising an oripavine and/or nororipavine aglycone and a glycosyl group.

[0007] In a further aspect the invention provides a microbial host cell genetically modified to produce an oripavine and/or nororipavine glycoside in the presense of a glycosyl donor, said cell expressing one or more heterologous genes encoding one or more UGTs, which in the presence of a glycosyl donor and a oripavine and/or nororipavine acceptor, transfers a glycosyl moiety from the glycosyl donor to the oripavine and/or nororipavine acceptor and thereby produce the oripavine and/or nororipavine glycoside.

[0008] In a further aspect the invention provides a cell culture, comprising host cell of the invention and a growth medium.

[0009] In a further aspect the invention provides a fermentation composition comprising the oripavine and/or nororipavine glycosides comprised in the cell culture of the invention.

[0010] In a final aspect the invention provides a composition comprising the fermentation liquid of the invention and/or the oripavine glycoside and/or nororipavine glycoside of the invention and one or more agents, additives and/or excipients.

### DESCRIPTION OF DRAWINGS AND FIGURES

[0011] The figures included herein are illustrative and simplified for clarity, and they merely show details which are essential to the understanding of the invention, while other details may have been left out. Throughout the specification, claims and drawings the same reference numerals are used for identical or corresponding parts. In the figures and drawing include herein:

[0012] FIG. 1 shows a stacked bar diagram showing values from two separate in vitro experiments. One experiment was done with UGTs and 500 μM oripavine as substrate, the other done with UGTs and 500 μM Nororipavine as substrate. Only the UGTs that show glucosylation activity on Oripavine and/or nororipavine are shown in the figure. Glucosylated Nororipavine abbreviated Nororipavine_Glu, and glucosylated oripavine abbreviated oripavine_Glu in legend.

[0013] FIG. 2 shows production of glucosylated Nororipavine and glucosylated oripavine in yeast strain sOD504 transformed by selected UGTs.

[0014] FIG. 3 shows dry weight biomass concentration during fed-batch fermentation of sOD507 and sOD515.

[0015] FIG. 4 shows the percentage increase in total Nororipavine production of a Nororipavine production strain expressing a UGT (strain sOD515) compared to an identical strain but without expression of a UGT (sOD507), during fed batch fermentation.

[0016] FIG. 5, FIG. 6 and FIG. 7 shows deglucosylation of nororipavine_glu in broth by glucosidase blends and 3 different sets of conditions.

[0017] FIG. 8 shows in vitro testing data of subfamily 72 UGTs in a stacked bar diagram combining results from two separate in vitro glucosylation experiments. One experiment with addition of 500 μM nororipavine and measurement of glucosylated nororipavine (nororipavine_Glu) and one experiment with addition of 500 μM oripavine and measurement of glucosylated oripavine (oripavine_Glu). Tested UGTs are listed on X-axis.

[0018] FIG. 9 shows the MS/MS spectra of nororipavine-glucosides in positive ion mode at the m/z indicated on the x-axis label.

[0019] FIG. 10 shows an enlarged region of a MS/MS spectrum for the nororipavine-glucoside fragment occurring at m/z 446.1820 in positive ion mode.

### INCORPORATION BY REFERENCE

[0020] All publications, patents, and patent applications referred to herein are incorporated by reference to the same extent as if each individual publication, patent, or patent application was specifically and individually indicated to be incorporated by reference. In the event of a conflict between a term herein and a term in an incorporated reference, the term herein prevails and controls.

### DETAILED DESCRIPTION OF THE INVENTION

[0021] The features and advantages of the present invention is readily apparent to a person skilled in the art by the below detailed description of embodiments and examples of the invention with reference to the figures and drawings included herein.

### Definitions

[0022] Any EC numbers than may be used herein refers to Enzyme Nomenclature 1992 from NC-IUBM B, Academic Press, San Diego, California, including 30 supplements 1-5 published in Eur. J. Bio-chem. 1994, 223, 1-5; Eur. J. Biochem. 1995, 232, 1-6; Eur. J. Biochem. 1996, 237, 1-5; Eur. J. Biochem. 1997, 250, 1-6; and Eur. J. Biochem. 1999, 264, 610-650; respectively. The nomenclature is regularly supplemented and updated; see e.g. http://enzyme.expasy.org/.

[0023] The term “E4P” as used herein refers to erythrose-4-phosphate.

[0024] The term “Aro4” as used herein refers to DAHP synthase catalyzing the reaction of PEP and E4P into DAHP.

[0025] The term “DAHP” as used herein refers to 3-deoxy-D-arabino-2-heptulosonic acid 7-phosphate.

[0026] The term “Aro1” as used herein refers to EPSP synthase catalyzing conversion of DAHP into EPSP.

[0027] The term “EPSP” as used herein refers to 5-enolpyruvylshikimate-3-phosphate.

[0028] The term “Aro2” as used herein refers to chorismate synthase catalyzing conversion of EPSP

[0029] into chorismate.

[0030] The term “Tyr1” as used herein refers to prephenate dehydrogenase catalyzing conversion of prephenate into 4-HPP

[0031] The term “4-HPP” as used herein refers to 4-hydroxyphenylpyruvate

[0032] The term “Aro8” and “Aro9” as used herein refers to aromatic aminotransferase reversibly catalyzing conversion of 4-HPP into L-tyrosine

[0033] The term “ARO10” or HPPDC as used herein refers to hydroxyphenylpyruvate decarboxylase catalyzing 4-HPP into 4-HPAA.

[0034] The term “4-HPAA” as used herein refers to 4-Hydroxyphenylacetaldehyde.

[0035] The term “TH” as used herein refers to a cytochrome P450 enzyme having tyrosine hydroxylase activity and converting L-tyrosine into L-DOPA.

[0036] The term “demethylase” as used herein refers to a P450 enzyme, capable of demethylating thebaine into northebaine, thebaine into oripavine, thebaine into nororipavine and/or oripavine into nororipavine.

[0037] The term “DRS” as used herein refers to 1,2-dehydroreticuline synthase, a cytochrome P450 enzyme which catalyze conversion of (S)-Reticuline into 1,2-dehydroreticuline.

[0038] The term “DRR” as used herein refers to 1,2-dehydroreticuline reductase which catalyzes conversion of 1,2-dehydroreticuline to (R)-Reticuline.

[0039] The term “DRS-DRR” as used herein refers to 1,2-dehydroreticuline synthase-1,2-dehydroreticuline reductase fused complex catalyzing conversion of (S)-Reticuline into (R)-reticuline. This complex may also be referred to as STORR or REPI. DRS-DRR or DRS together with DRR are also categorised as epimerases or isomerases.

[0040] The term “CPR” as used herein refers to a cytochrome P450 reductase catalyzing the electron transfer (from NADPH) to a cytochrome P450 enzyme of the pathway, typically in the endoplasmic reticulum of a eukaryotic cell. For distinction and as disclosed herein CPR's are divided into demethylase-CPR used for CPR's capable of reducing demethylases; DRS-CPR used for CPR's capable of reducing DRS and TH-CPR used for CPR's capable of reducing TH. Demethylase-CPR, DRS-CPR and TH-CPR may be identical or different, depending on the P450 to be reduced.

[0041] The term “Cytochrome P450 enzyme” or “P450 enzymes” or “P450” as used herein interchangeably refers to a family of monooxygenases enzymes containing heme as a cofactor. P450s are also known as “CYPs”. For distinction and as disclosed herein P450 enzymes are divided into demethylase P450s; DRS P450s, and TH P450s.

[0042] The term “family CYP6” as used herein about some demethylases refers to demethylases having >40% amino acid sequence identity to any known demethylase belonging to CYP6 family as defined by Nelson 2006, Cytochrome P450 Nomenclature, included herein by reference.

[0043] The term “family CYP76” as used herein about some THs refers to THs having tyrosine hydroxylase activity and capable of catalyzing L-tyrosine into L-DOPA.

[0044] The term “DODC” and TYDC″ as used herein refers to L-dopa decarboxylase and tyrosine decarboxylase respectively catalyzing conversion of L-DOPA into dopamine and tyrosine into 4-HPP.

[0045] The term “MAO” as used herein refers to monoamine oxidase catalyzing conversion of dopamine to 3,4 DHPAA

[0046] The term “DHPAA” as used herein refers to 3,4-dihydroxyphenylacetaldehyde.

[0047] The term “NCS” as used herein refers to Norcoclaurine synthase catalyzing conversion of dopamine and 4-HPAA into Norcoclaurine.

[0048] The term “6-OMT” as used herein refers to 6-O-methyltransferase catalyzing conversion of (S)-norcoclaurine to (S)-Coclaurine

[0049] The term “CNMT” as used herein refers to Coclaurine-N-methyltransferase catalyzing conversion of (S)-Coclaurine to (S)—N-Methylcoclaurine and/or (S)-3′-hydroxycoclaurine to (S)-3′-hydroxy-N-methyl-coclaurine.

[0050] The term “NMCH” as used herein refers to N-methylcoclaurine 3′-monooxygenase catalyzing conversion of (S)-Coclaurine to (S)-3′-hydroxycoclaurine and/or (S)—N-Methylcoclaurine to (S)-3′-Hydroxy-N-M ethylcoclaurine

[0051] The term “4′-OMT” as used herein refers to 3′-hydroxy-N-methyl-(S)-coclaurine 4′-O-methyltransferase catalyzing conversion of (S)-3′-Hydroxy-N-Methylcoclaurine to (S)-reticuline.

[0052] The term “SAS” as used herein refers to salutaridine synthase catalyzing conversion of (R)-reticuline to Salutaridine.

[0053] The term “SAR” as used herein refers to salutaridine reductase catalyzing conversion of Salutaridine to Salutaridinol.

[0054] The term “SAT” as used herein refers to salutaridinol 7-O-acetyltransferase catalyzing conversion of Salutaridinol to 7-O-acetylsalutaridinol.

[0055] The term “THS” as used herein refers to thebaine synthase catalyzing conversion of 7-O-acetylsalutaridinol into thebaine.

[0056] The term “BIA” or “benzylisoquinoline alkaloid” as used herein refers to a compound of the general formula A:

[chemical structure]

which is the structural backbone of many alkaloids with a wide variety of structures, or to alkaloid products deriving from formula A of the general formula B also known as morphinans:

[chemical structure]

[0057] The terms “heterologous” or “recombinant” or “genetically modified” and their grammatical equivalents as used herein interchangeably refers to entities “derived from a different species or cell”. For example, a heterologous or recombinant polynucleotide gene is a gene in a host cell not naturally containing that gene, i.e. the gene is from a different species or cell type than the host cell. The terms as used herein about host cells refers to host cells comprising and expressing heterologous or recombinant polynucleotide genes.

[0058] The term “pathway” or “metabolic pathway” or “biosynthetic metabolic pathway” or “operative biosynthetic metabolic pathway” as used herein interchangeably is intended to mean one or more enzymes acting in a live cell to convert a chemical substrate into a chemical product. A pathway may include one enzyme or multiple enzymes acting in sequence. A pathway including only one enzyme may also herein be referred to as “bioconversion”, which is particularly relevant where a cell is fed with a precursor or substrate to be converted by the enzyme into a desired product molecule. Enzymes are characterized by having catalytic activity, which can change the chemical structure of the substrate(s). An enzyme may have more than one substrate and produce more than one product. The enzyme may also depend on cofactors, which can be inorganic chemical compounds or organic compounds (co-factor and/or co-enzymes). The NADPH-dependent cytochrome P450 reductase (CPR) is an electron donor to cytochromes P450 (CYPs). CPR shuttles electrons from NADPH through the Flavin Adenine Dinucleotide (FAD) and Flavin Mononucleotide (FMN) coenzymes into the iron of the prosthetic heme-group of the CYP.

[0059] The term “in vivo”, as used herein refers to within a living cell or organism, including, for example animal, a plant or a microorganism.

[0060] The term “in vitro”, as used herein refers to outside a living cell or organism, including, without limitation, for example, in a microwell plate, a tube, a flask, a beaker, a tank, a reactor and the like.

[0061] The term “substrate” or “precursor”, as used herein refers to any compound that can be converted into a different compound. For example, thebaine can be a substrate for P450 and can be converted by demethuylation into Northebaine. For clarity, substrates and/or precursors include both compounds generated in situ by a enzymatic reaction in a cell or exogenously provided compounds, such as exogenously provided organic molecules which the host cell can metabolize into a desired compound.

[0062] Term “endogenous” or “native” as used herein refers to a gene or a polypeptide in a host cell which originates from the same host cell.

[0063] The term “deletion” as used herein refers to manipulation of a gene so that it is no longer expressed in a host cell.

[0064] The term “disruption” as used herein refers to manipulation of a gene or any of the machinery participating in the expression the gene, so that it is no longer expressed in a host cell.

[0065] The term “attenuation” as used herein refers to manipulation of a gene or any of the machinery participating in the expression the gene, so that it the expression of the gene is reduced as compared to expression without the manipulation.

[0066] The terms “substantially” or “approximately” or “about”, if used herein refers to a reasonable deviation around a value or parameter such that the value or parameter is not significantly changed. These terms of deviation from a value should be construed as including a deviation of the value where the deviation would not negate the meaning of the value deviated from. For example, in relation to a reference numerical value the terms of degree can include a range of values plus or minus 10% from that value. For example, deviation from a value can include a specified value plus or minus a certain percentage from that value, such as plus or minus 9%, 8%, 7%, 6%, 5%, 4%, 3%, 2%, or 1% from the specified value.

[0067] The term “and/or” as used herein is intended to represent an inclusive “or”. The wording X and/or Y is meant to mean both X or Y and X and Y. Further the wording X, Y and/or Z is intended to mean X, Y and Z alone or any combination of X, Y, and Z.

[0068] The term “isolated” as used herein about a compound, refers to any compound, which by means of human intervention, has been put in a form or environment that differs from the form or environment in which it is found in nature. Isolated compounds include but is no limited to compounds of the invention for which the ratio of the compounds relative to other constituents with which they are associated in nature is increased or decreased. In an important embodiment the amount of compound is increased relative to other constituents with which the compound is associated in nature. In an embodiment the compound of the invention may be isolated into a pure or substantially pure form. In this context a substantially pure compound means that the compound is separated from other extraneous or unwanted material present from the onset of producing the compound or generated in the manufacturing process. Such a substantially pure compound preparation contains less than 10%, such as less than 8%, such as less than 6%, such as less than 5%, such as less than 4%, such as less than 3%, such as less than 2%, such as less than 1%, such as less than 0.5% by weight of other extraneous or unwanted material usually associated with the compound when expressed natively or recombinantly. In an embodiment the isolated compound is at least 90% pure, such as at least 91% pure, such as at least 92% pure, such as at least 93% pure, such as at least 94% pure, such as at least 95% pure, such as at least 96% pure, such as at least 97% pure, such as at least 98% pure, such as at least 99% pure, such as at least 99.5% pure, such as 100% pure by weight.

[0069] The term “non-naturally occurring” if used herein about a substance, refers to any substance that is not normally found in nature or natural biological systems. In this context the term “found in nature or in natural biological systems” does not include the finding of a substance in nature resulting from releasing the substance to nature by deliberate or accidental human intervention. Non-naturally occurring substances may include substances completely or partially synthetized by human intervention and/or substances prepared by human modification of a natural substance.

[0070] The term “% identity” is used herein about the relatedness between two amino acid sequences or between two nucleotide sequences.

[0071] The term “% identity” as used herein about amino acid or nucleotide sequences refers to the degree of identity in percent between two amino acid sequences obtained when using the Needleman-Wunsch algorithm (Needleman and Wunsch, 1970, J. Mol. Biol. 48: 443-453) as implemented in the Needle program of the EMBOSS package (EMBOSS: The European Molecular Biology Open Software Suite, Rice et al., 2000, Trends Genet. 16: 276-277), preferably version 5.0.0 or later. The parameters used are gap open penalty of 10, gap extension penalty of 0.5, and the EBLOSUM62 (EMBOSS version of BLOSUM62) substitution matrix. The output of Needle labeled “longest identity” (obtained using the -nobrief option) is used as the percent identity and is calculated as follows:

$$\frac{iden tical amino acid residues}{Length of alignment - total number of gaps in alignment} \times 100$$

The term “% identity” as used herein about nucleotide sequences refers to the degree of identity in percent between two nucleotide sequences obtained when using the Needleman-Wunsch algorithm (Needleman and Wunsch, 1970, supra) as implemented in the Needle program of the EMBOSS package (EMBOSS: The European Molecular Biology Open Software Suite, Rice et al., 2000, supra), preferably version 5.0.0 or later. The parameters used are gap open penalty of 10, gap extension penalty of 0.5, and the EDNAFULL (EMBOSS version of NCBI NUC4.4) substitution matrix. The output of Needle labeled “longest identity” (obtained using the -nobrief option) is used as the percent identity and is calculated as follows:

$$\frac{identical deoxyribonucleotides}{Length of alignment - total number of gaps in alignment} \times 100$$

The protein sequences of the present invention can further be used as a “query sequence” to perform a search against sequence databases, for example to identify other family members or related sequences. Such searches can be performed using the BLAST programs. Software for performing BLAST analyses is publicly available through the National Center for Biotechnology Information (http://www.ncbi.nlm.nih.gov). BLASTP is used for amino acid sequences and BLASTN for nucleotide sequences. The BLAST program uses as defaults:
[0072] Cost to open gap: default=5 for nucleotides/11 for proteins
[0073] Cost to extend gap: default=2 for nucleotides/1 for proteins
[0074] Penalty for nucleotide mismatch: default=−3
[0075] Reward for nucleotide match: default=1
[0076] Expect value: default=10
[0077] Wordsize: default=11 for nucleotides/28 for megablast/3 for proteins.

[0078] Furthermore, the degree of local identity between the amino acid sequence query or nucleic acid sequence query and the retrieved homologous sequences is determined by the BLAST program. However only those sequence segments are compared that give a match above a certain threshold. Accordingly, the program calculates the identity only for these matching segments. Therefore, the identity calculated in this way is referred to as local identity. Alternatively, % identity for any candidate nucleic acid or amino acid sequence relative to a reference sequence can be determined as follows. A reference sequence (e.g., a nucleic acid sequence or an amino acid sequence described herein) is aligned to one or more candidate sequences using the computer program Clustal Omega (version 1.2.1, default parameters), which allows alignments of nucleic acid or polypeptide sequences to be carried out across their entire length (global alignment). Chenna et al., 2003, Nucleic Acids Res. 31(13):3497-500.

[0079] Clustal Omega calculates the best match between a reference and one or more candidate sequences, and aligns them so that identities, similarities and differences can be determined. Gaps of one or more residues can be inserted into a reference sequence, a candidate sequence, or both, to maximize sequence alignments. For fast pairwise alignment of nucleic acid sequences, the following default parameters are used: word size: 2; window size: 4; scoring method: % age; number of top diagonals: 4; and gap penalty: 5. For multiple alignment of nucleic acid sequences, the following parameters are used: gap opening penalty: 10.0; gap extension penalty: 5.0; and weight transitions: yes. For fast pairwise alignment of protein sequences, the following parameters are used: word size: 1; window size: 5; scoring method:% age; number of top diagonals: 5; gap penalty: 3. For multiple alignment of protein sequences, the following parameters are used: weight matrix: blosum; gap opening penalty: 10.0; gap extension penalty: 0.05; hydrophilic gaps: on; hydrophilic residues: Gly, Pro, Ser, Asn, Asp, Gln, Glu, Arg, and Lys; residue-specific gap penalties: on. The Clustal Omega output is a sequence alignment that reflects the relationship between sequences. Clustal Omega can be run, for example, at the Baylor College of Medicine Search Launcher site on the World Wide Web (searchlauncher.bcm.tmc.edu/multi-align/multi-align.html) and at the European Bioinformatics Institute site at http://www.ebi.ac.uk/Tools/msa/clustalo/. To determine a % identity of a candidate nucleic acid or amino acid sequence to a reference sequence, the sequences are aligned using Clustal Omega, the number of identical matches in the alignment is divided by the length of the reference sequence, and the result is multiplied by 100. It is noted that the % identity value can be rounded to the nearest tenth. For example, 78.11, 78.12, 78.13, and 78.14 are rounded down to 78.1, while 78.15, 78.16, 78.17, 78.18, and 78.19 are rounded up to 78.2.

[0080] The term “mature polypeptide” or “mature enzyme” as used herein refers to a polypeptide in its final active form following translation and any post-translational modifications, such as N-terminal processing, C-terminal truncation, glycosylation, phosphorylation, etc. It is known in the art that a host cell may produce a mixture of two of more different mature polypeptides (i.e., with a different C-terminal and/or N-terminal amino acid) expressed by the same polynucleotide.

[0081] The term “cDNA” refers to a DNA molecule that can be prepared by reverse transcription from a mature, spliced, mRNA molecule obtained from a eukaryotic or prokaryotic cell. cDNA lacks intron sequences that may be present in the corresponding genomic DNA. The initial, primary RNA transcript is a precursor to mRNA that is processed through a series of steps, including splicing, before appearing as mature spliced mRNA.

[0082] The term “coding sequence” refers to a nucleotide sequence, which directly specifies the amino acid sequence of a polypeptide. The boundaries of the coding sequence are generally determined by an open reading frame, which begins with a start codon such as ATG, GTG, or TTG and ends with a stop codon such as TAA, TAG, or TGA. The coding sequence may be a genomic DNA, cDNA, synthetic DNA, or a combination thereof.

[0083] The term “control sequence” as used herein refers to a nucleotide sequence necessary for expression of a polynucleotide encoding a polypeptide. A control sequence may be native (i.e., from the same gene) or heterologous or foreign (i.e., from a different gene) to the polynucleotide encoding the polypeptide. Control sequences include, but are not limited to leader sequences, polyadenylation sequence, pro-peptide coding sequence, promoter sequences, signal peptide coding sequence, translation terminator (stop) sequences and transcription terminator (stop) sequences. To be operational control sequences usually must include promoter sequences, transcriptional and translational stop signals. Control sequences may be provided with linkers for the purpose of introducing specific restriction sites facilitating ligation of the control sequences with a coding region of a polynucleotide encoding a polypeptide.

[0084] The term “expression” includes any step involved in the production of a polypeptide including, but not limited to, transcription, post-transcriptional modification, translation, post-translational modification, and secretion.

[0085] The term “expression vector” refers to a DNA molecule, either single- or double stranded, either linear or circular, which comprises a polynucleotide encoding a polypeptide and is operably linked to control sequences that provide for its expression. Expression vectors include expression cassettes for the integration of genes into a host cell as well as plasmids and/or chromosomes comprising such genes.

[0086] The term “host cell” refers to any cell type that is susceptible to transformation, transfection, transduction, or the like with a nucleic acid construct or expression vector comprising a polynucleotide of the present invention. Host cell encompasses any progeny of a parent cell that is not identical to the parent cell due to mutations that occur during replication.

[0087] The term “polynucleotide construct” refers to a polynucleotide, either single- or double stranded, which is isolated from a naturally occurring gene or is modified to contain segments of nucleic acids in a manner that would not otherwise exist in nature or which is synthetic, and which comprises a polynucleotide encoding a polypeptide and one or more control sequences.

[0088] The term “operably linked” refers to a configuration in which a control sequence is placed at an appropriate position relative to the coding polynucleotide such that the control sequence directs expression of the coding polynucleotide.

[0089] The terms “nucleotide sequence and “polynucleotide” are used herein interchangeably.

[0090] The term “comprise” and “include” as used throughout the specification and the accompanying items as well as variations such as “comprises”, “comprising”, “includes” and “including” are to be interpreted inclusively. These words are intended to convey the possible inclusion of other elements or integers not specifically recited, where the context allows.

[0091] The articles “a” and “an” are used herein refers to one or to more than one (i.e. to one or at least one) of the grammatical object of the article. By way of example, “an element” may mean one element or more than one element.

[0092] Terms like “preferably”, “commonly”, “particularly”, and “typically” are not utilized herein to limit the scope of the itemed invention or to imply that certain features are critical, essential, or even important to the structure or function of the itemed invention. Rather, these terms are merely intended to highlight alternative or additional features that can or cannot be utilized in a particular embodiment of the present invention.

[0093] The term “cell culture” as used herein refers to a culture medium comprising a plurality of host cells of the invention. A cell culture may comprise a single strain of host cells or may comprise two or more distinct host cell strains. The culture medium may be any medium that may comprise a recombinant host, e.g., a liquid medium (i.e., a culture broth) or a semi-solid medium, and may comprise additional components, e.g., a carbon source such as dextrose, sucrose, glycerol, or acetate; a nitrogen source such as ammonium sulfate, urea, or amino acids; a phosphate source; vitamins; trace elements; salts; amino acids; nucleobases; yeast extract; aminoglycoside antibiotics such as G418 and hygromycin B.

[0094] All methods described herein can be performed in any suitable order of steps unless otherwise indicated herein or otherwise clearly contradicted by context. The use of any and all examples, or exemplary language (e.g., “such as”) provided herein is intended merely to better illuminate the invention and does not pose a limitation on the scope of the invention otherwise claimed. No language in the specification should be construed as indicating any non-claimed element essential to the practice of the invention.

[0095] All percentages, ratios and proportions herein are by weight, unless otherwise specified. A weight percent (weight %, also as wt. %) of a component, unless specifically stated to the contrary, is based on the total weight of the composition in which the component is included (e.g., on the total amount of the reaction mixture).

[0096] The term “glycosyl transferase” or “GT” as used herein refers to enzymes (EC2.4) that catalyze formation of glycosides by transfer of a glycosyl group (sugar) from an activated glycosyl donor to a nucleophilic glycosyl acceptor molecule, the nucleophile of which can be oxygen- carbon-, nitrogen-, or sulfur-based and in particular. The product of glycosyl transfer may be an O-, N-, S-, or C-glycoside. Glycosyltransferases may further be divided into different families depending on the 3D structure and reaction mechanism. More specifically the GT family 1 refers to UDP glycosyltransferases (UGTs) containing the PSPG box binding UDP-sugars. UGT-family members may further be divided into subfamilies and lower groupings as defined by the UGT Nomenclature Committee (Mackenzie et al., 1997) depending on the amino acid identity. Identities >40% belong to the same UGT-family e.g. UGT subfamily 71, 72 or 73, and amino acid identities >60% defines the subfamily groups e.g. UGT73Y.

[0097] The term “nucleotide glycoside” as used herein about glycosyl donors refers to compounds comprising a nucleotide moiety covalently linked to a glycosyl group, where the nucleotide comprise a nucleoside covalently linked to one or more phosphate groups. Such compounds are also referred to as “activated glycosides” and where the glycosyl group is a sugar as “nucleotide sugars” or “activated sugars”.

[0098] The terms “di-glycoside”, “tri-glycoside” and “tetra-glycoside” refer to molecules with 2, 3, and 4 glycoside moieties attached together at any 0-linkage.

### Method of Glycosylation

[0099] The invention provides a method for producing an oripavine and/or nororipavine glycoside comprising providing (i) a oripavine and/or nororipavine acceptor, (ii) a glycosyl donor, and (iii) a glycosyl transferase (UGT), and contacting the oripavine and/or nororipavine acceptor, the glycosyl donor, and the UGT at conditions allowing the UGT to transfer a glycosyl moiety from the glycosyl donor to the oripavine and/or nororipavine acceptor and thereby produce the oripavine and/or nororipavine glycoside.

[0100] The glycosyl donor is suitably a NTP-glycoside, aNDP-glycoside or a NMP-glycoside, wherein the the nucleoside is suitably selected from from Uridine, Adenosin, Guanosin, Cytidin and deoxythymidine. Such glycosyl donors include UDP-glycosides, ADP-glycosides, CDP-glycosides, CMP-glycosides, dTDP-glycosides and GDP-glycosides. In a particular embodiment the glycosyl donor is an NDP-glycoside, preferably having a Uridine nucleoside. Such glycosyl donors that are particularly useful are UDP-D-glucose (UDP-Glc), UDP-xylose (UDP-Xyl) or UDP-N-acetyl-D-glucosamine (UDP-GlcNAc).

[0101] Glycosyl transferases useful in the present invention include UGT's, in particular aglycone 0-UGTs. In some embodiments the UGT is an aglycone 0-glucosyltransferase.

[0102] Glycosyl transferases, such as UGTs, which comprises one or more amino acids G, H, I, I, H, G, I, L, S, H, G, N, at the positions corresponding to position 16, 17, 19, 169, 172, 173, 177, 200, 271, 360, 362, 364, 365, and 368 respectively of SEQ ID NO: 96 (non-gapped protein sequence) or conservative substitutions thereof are particularly useful for the method of the invention as it has been found that these have specificity for glycosylating oripavine and/or nororipavine. In some embodiments UGTs comprising amino acid G at the position corresponding to position 16 of SEQ ID NO: 96 are preferred, while additionally or alternatively in other embodiments UGTs comprising H at the position corresponding to position 17 of SEQ ID NO: 96 are preferred; while additionally or alternatively in still further embodiments UGT's comprising I or V at the position corresponding to position 19 of SEQ ID NO: 96 are preferred; while additionally or alternatively in still further embodiments UGTs comprising I or V at the position corresponding to position 169 of SEQ ID NO: 96 are preferred; while additionally or alternatively in still further embodiments UGTs comprising H at the position corresponding to position 172 of SEQ ID NO: 96 are preferred. In further additional or alternative embodiments UGTs comprising amino acids I, L, S or A at the position corresponding to position 177 of SEQ ID NO: 96 or amino acids G, S, H, G, N, S and E at the positions corresponding to position 173, 271, 360, 262, 364, 365 and 368 of SEQ ID NO: 96 are preferred. UGTs comprising any combination of these characteristic amino acids are also useful in the method of the invention. Also UGT's which have L, I or V at the position corresponding to position 200 of SEQ ID NO: 96 are attractive, more preferably L at position 200.

[0103] Further it has also been found that UGTs most useful for glycosylating oripavine or nororipavine does not comprise a R and/or M at the positions corresponding to position 17 and/or 177 respectively of SEQ ID NO: 96. Additionally or alternatively the UGT does not have any one of amino acids Q, Y, P, K, L or N at the position corresponding to position 172 of SEQ ID NO: 96. Additionally or alternatively the UGT does not have any one of amino acids M, S, or Q at the position corresponding to position 200 of SEQ ID NO: 96.

[0104] Accordingly, in one embodiment the UGT's described herein comprise one or more amino acids G, H, I, I, H, G, I, L, S, H, G, and/or N at the positions corresponding to position 16, 17, 19, 169, 172, 173, 177, 200, 271, 360, 362, 364, 365, and 368 respectively of SEQ ID NO: 96 or conservative substitutions thereof. Additionally or alternatively, in another embodiment the UGT's described herein comprise an amino acid G at the position corresponding to position 16 of SEQ ID NO: 96. Additionally or alternatively, in another embodiment the UGT's described herein comprise an amino acid H at the position corresponding to position 17 of SEQ ID NO: 96. Additionally or alternatively, in another embodiment the UGT's described herein comprise an amino acid I or V at the position corresponding to position 19 of SEQ ID NO: 96. Additionally or alternatively, in another embodiment the UGT's described herein comprise amino acids I or V at the position corresponding to position 169 of SEQ ID NO: 96. Additionally or alternatively, in another embodiment the UGT's described herein comprise amino acids I, L, S or A at the position corresponding to position 177 of SEQ ID NO: 96 or conservative substitutions thereof. Additionally or alternatively, in another embodiment the UGT's described herein comprise amino acid H at the position corresponding to position 172 of SEQ ID NO: 96. Additionally or alternatively, in another embodiment the UGT's described herein comprise amino acids G, L, S, H, G, N, S and E at the positions corresponding to position 173, 200, 271, 360, 262, 364, 365 and 368 of SEQ ID NO: 96. Additionally or alternatively, in another embodiment the UGT's described herein comprise amino acids L, I or V at the position corresponding to position 200 of SEQ ID NO: 96.

[0105] The UGT can in some embodiments be derived from a plant, in particular a plant selected from the genera of Quercus, optionally Quercus suber.

[0106] In further embodiments UGT is a subfamily 71 UGT (71-UGT), a subfamily 72 UGT (72-UGT) and/or a subfamily 73 UGT (73-UGT), which has been found to be effective at glycosylating oripavine and/or nororipavine, both in vitro and in vivo. Such UGTs suitably comprises an amino acid sequence which has at least 60%, such as at least 70%, such at least 75%, such as at least 80%, such as at least 90%, such as at least 95%, such as at least 99%, such as 100% identity to a UGT comprised in anyone of SEQ ID NO: 61, 62, 63, 64, 65, 66, 67, 68, 69, 70, 71, 72, 73, 74, 75, 76, 77, 78, 79, 80, 81, 82, 83, 84, 85, 86, 87, 88, 89, 90, 91, 92, 93, 94, 95, 96, 97, 98, 99, 100, 101, 102, 103, 104, 105, 106, 107, 108, 109, 110, 111, 112, 113, 114, 115, 116, 117, 118, 119, 120, 170, 172, 174, 176, 178, 180, 182, 184, 186, 188, 190, 192, 194, 196, 198, 200, 202, 204, 206, 208, 210, 212, 214, 216, 218, 220, or 222. The UGT of the invention is suitably a good performer regarding activity and/or specificity towards Oripavine and/or nororipavine. Such UGTs suitably comprise an amino acid sequence which has at least 60%, such as at least 70%, such at least 75%, such as at least 80%, such as at least 90%, such as at least 95%, such as at least 99%, such as 100% identity to a UGT comprised in anyone of SEQ ID NO: 63, 77, 81, 82, 83, 84, 86, 87, 92, 93, 94, 95, 96, 97, 98, 99, 100, 101, 102, 103, 104, 105, 107, 108, 111, 112, 115, 116, 117, 170, 172, 174, 176, 178, 180, 182, 184, 186, 188, 190, 192, 194, 196, 198, 200, 202, 204, 206, 208, 210, 212, 214, 216, 218, 220, or 222.

[0107] In some embodiments the UGT of the invention has superior activity such as UGTs comprising an amino acid sequence which has at least 60%, such as at least 70%, such at least 75%, such as at least 80%, such as at least 90%, such as at least 95%, such as at least 99%, such as 100% identity to a UGT comprised in anyone of SEQ ID NO: 63, 83, 84, 86, 87, 101, 102, 103, 104, 105, 115, 170, 172, 174, 176, 178, 180, 182, 184, 186, 188, 190, 192, 194, 196, 198, 200, 202, 204, 206, 208, 210, 212, 214, 216, 218, 220, or 222.

[0108] In other embodiments the UGT of the invention has a superior specificity towards nororipavine which is at least 50% higher, such as at least 75% higher, such as at least 90% higher than the specificity towards oripavine, when performing the glycosylation in aqeuous tris buffer at pH 7,4 at 30° C. and at 0.5 mM substrate level. Such nororipavine specific UGTs include those comprising an amino acid sequence which has at least 60%, such as at least 70%, such at least 75%, such as at least 80%, such as at least 90%, such as at least 95%, such as at least 99%, such as 100% identity to a UGT comprised in anyone of SEQ ID NO: 77, 81, 82, 92, 93, 94, 95, 96, 97, 98, 99, 100, 102, 103, 104, 105, 107, 108, 116, or 117. Among nororipavine specific UGTs those also having superior activity are particularly useful such as the UGTs comprising an amino acid sequence which has at least 60%, such as at least 70%, such at least 75%, such as at least 80%, such as at least 90%, such as at least 95%, such as at least 99%, such as 100% identity to a UGT comprised in anyone of SEQ ID NO: 102, 103, 104, or 105.

[0109] In other embodiments the UGT of the invention has a superior specificity towards oripavine which is at least 50% higher, such as at least 75% higher, such as at least 90% higher than the specificity towards nororipavine, when performing the glycosylation in aqueous tris buffer at pH 7,4 at 30° C. and at 0.5 mM substrate level. Such oripavine specific UGTs include those which has at least 60%, such as at least 70%, such at least 75%, such as at least 80%, such as at least 90%, such as at least 95%, such as at least 99%, such as 100% identity to a UGT comprised in anyone of SEQ ID NO: 111, 112, or 115. Among oripavine specific UGTs those also having superior activity are particularly useful such as the UGTs comprising an amino acid sequence which has at least 60%, such as at least 70%, such at least 75%, such as at least 80%, such as at least 90%, such as at least 95%, such as at least 99%, such as 100% identity to a UGT comprised in SEQ ID NO: 115.

[0110] In separate embodiments the UGT of the invention is a subfamily 71 UGT which comprises an amino acid sequence which has at least 60%, such as at least 70%, such at least 75%, such as at least 80%, such as at least 90%, such as at least 95%, such as at least 99%, such as 100% identity to a 71-UGT comprised in anyone of SEQ ID NO: 61, 62, 63, 64, 65, 66, 67, 68, 69, 70, 71, 72, 73, 74, 75, 76, 77, 78, 79, 80, 81, 82, 83, 84, 85, 86, 87, 88, 89, or 90. Among the subfamily 71 UGTs those also having superior performance are preferred, such as those comprising an amino acid sequence which has at least 60%, such as at least 70%, such at least 75%, such as at least 80%, such as at least 90%, such as at least 95%, such as at least 99%, such as 100% identity to a 71-UGT comprised in anyone of SEQ ID NO: 63, 77, 81, 82, 83, 84, 86, or 87.

[0111] In further separate embodiments the UGT of the invention is a subfamily 72 UGT which comprises an amino acid sequence which has at least 60%, such as at least 70%, such at least 75%, such as at least 80%, such as at least 90%, such as at least 95%, such as at least 99%, such as 100% identity to a 72-UGT comprised in anyone of SEQ ID NO: 91, 92, 93, 94, 95, 96, 97, 98, 99, 100, 101, 102, 103, 104, 105, 106, 107, or 108. Among the subfamily 72 UGTs those also having superior performance are preferred, such as those comprising an amino acid sequence which has at least 60%, such as at least 70%, such at least 75%, such as at least 80%, such as at least 90%, such as at least 95%, such as at least 99%, such as 100% identity to a 72-UGT comprised in anyone of SEQ ID NO: 92, 93, 94, 95, 96, 97, 98, 99, 100, 101, 102, 103, 104, 105, 107, or 108.

[0112] In still further separate embodiments the UGT of the invention is a subfamily 73 UGT which comprises an amino acid sequence which has at least 60%, such as at least 70%, such at least 75%, such as at least 80%, such as at least 90%, such as at least 95%, such as at least 99%, such as 100% identity to a 73-UGT comprised in anyone of SEQ ID NO: 109, 110, 111, 112, 113, 114, 115, 116, 117, 118, 119, 120. Among the subfamily 73 UGTs those also having superior performance are preferred, such as those comprising an amino acid sequence which has at least 60%, such as at least 70%, such at least 75%, such as at least 80%, such as at least 90%, such as at least 95%, such as at least 99%, such as 100% identity to a 73-UGT comprised in anyone of SEQ ID NO: 111, 112, 115, 116, or 117.

[0113] The method of the invention may also include one or more demethylation steps selected from
[0114] a) converting thebaine to oripavine;
[0115] b) converting thebaine to northebaine;
[0116] c) converting oripavine to nororipavine; and/or
[0117] d) converting northebaine to nororipavine;
   by contacting the thebaine, northebaine and/or oripavine with one or more 0-demethylases and/or N-demethylases. Suitable demethylases for use in such demethylation include those comprising and amino acid sequence which has at least 60%, such as at least 70%, such at least 75%, such as at least 80%, such as at least 90%, such as at least 95%, such as at least 99%, such as 100% identity to a to a demethylase comprised in any one of SEQ ID NO: 153, 155, 157, 256, or 258. Other examples which works remarkably well in converting thebaine and/or oripavine with low formation of by-products in a heterologous host cell includes the insect demethylases disclosed in WO2021069714 as SEQ ID NO: 140, 142, 144, 146, 148, 150, 152, 154, 156, 158, 160, 162, 164, 166, 168, 170, 172, 174, 176, 178, 180, 182, 184, 186, 188, 190, 192, 194, 196, 827, 829, 831, 833, 835, 837, 839, 841, 843, 845, 847, 849, 851, 853, 855, 857, 859, 861, 863, 865, 867 and 869, incorporated herein by reference.

[0118] The demethylase activity may further be enhanced or co-factored by a demethylase-CPR capable of reducing the demethylase after demethylation, such as a demethylase-CPR comprising and amino acid sequence which has at least 60%, such as at least 70%, such at least 75%, such as at least 80%, such as at least 90%, such as at least 95%, such as at least 99%, such as 100% identity to a to the demethylase-CPR comprised in anyone of SEQ ID NO: 159, 161, or 260. One skilled in the art would recognize that other P450 demethylases and CPR pairs would work for production of nororipavine from oripavine, for example SEQ ID NO: 292, 294, 296, 298, 300 or 302 described in WO2021069714. In a particular embodiment the conversion rate (units mass⁻¹ time⁻¹) of the demethylase is increased compared to the conversion rate absent any UGT's converting the oripavine and/or nororipavine and the glycosyl donor into the corresponding oripavine and/or nororipavine glycoside.

### Method of Deglycosylation

[0119] In another aspect invention provides a method for producing a oripavine- and/or nororipavine aglycone comprising providing (i) a oripavine and/or nororipavine glycoside and (ii) a glycosidases and contacting the oripavine and/or nororipavine glycoside and (ii) with the glycosidase at conditions allowing the glycosidase to catalyze separation of a glycosyl moiety from the oripavine and/or nororipavine glycoside and thereby produce the oripavine and/or nororipavine aglycone. The glycosidase may suitably be a β-glycosidase, such as a β-glucosidase.

[0120] The deglycosylation method can also include any feature or combination of features of the glycolation method of the invention.

[0121] In the glycosylation method or the deglycosylation method of the invention the contacting of the oripavine and/or nororipavine acceptor, the glycosyl donor, and the UGT or the oripavine-glycoside and/or nororipavine-glycoside and the glycosidase is may suitably be made in a buffered aqueous solution at a pH from 4,0 to 8,5 and at a temperature of 10 to 85° C.

### Glycosylated Oripavines and Nororipavines

[0122] In a further aspect the invention also provides oripavine and/or nororipavine glycosides. Such glycosides are suitably oripavine-O-glycosides or nororipavine-O-glycosides. The glycosyl group is preferably glucose and the corresponding glycoside an oripavine-O-glucoside or a nororipavine-O-glucoside.

### Nororipavine-O-Glucoside:

[chemical structure]

### Oripavine-O-Glucoside:

[chemical structure]

Genetically Modified Host Cells Producing Glycosylated Oripavine and/or Glycosylated Nororipavine

[0125] In a further aspect of the invention the method as described, supra, is performed in a host cell genetically modified to produce oripavine an/or nororipavine glycosides. Accordingly, the present invention also provides host cells, which are genetically modified to produce an oripavine glycoside and/or nororipavine glycoside in the presense of a glycosyl donor, wherein the host cell expresses one or more heterologous genes encoding one or more UGT's, which in the presence of a glycosyl donor and a oripavine acceptor and/or nororipavine acceptor, transfers a glycosyl moiety from the glycosyl donor to the oripavine acceptor and/or nororipavine acceptor and thereby produce the oripavine glycoside and/or nororipavine glycoside. UGT's and glycosyl donors for performing the method in the genetically modified cell are suitably those described, supra, for the method.

[0126] In some embodiment the host cell further comprises genes of an operative biosynthetic pathway which produces the oripavine acceptor and/or nororipavine acceptor and even the glycosyl donor. Operative biosynthetic pathways capable of producing the oripavine acceptor and/or nororipavine acceptor, suitably comprises one or more polypeptides selected from:
[0127] a) a 3-deoxy-D-arabino-2-heptulosonic acid 7-phosphate synthase (DAHP synthase) converting PEP and E4P into DAHP;
[0128] b) a 5-enolpyruvylshikimate-3-phosphate (EPSP) synthase (aro1) converting 3-phosphoshikimate and PEP into EPSP;
[0129] c) an aro1 polypeptide converting DHAP and PEP into EPSP;
[0130] d) a chorismate synthase converting EPSP into Chorismate;
[0131] e) a chorismate mutase converting Chorismate into prephenate;
[0132] f) a prephenate dehydrogenase (Tyr1) converting prephenate into 4-HPP;
[0133] g) an aromatic aminotransferase converting 4-HPP into L-Tyrosine;
[0134] h) a tyrosine hydroxylase (TH) converting L-tyrosine into L-dopa
[0135] i) a TH-CPR capable of reducing the TH of h);
[0136] j) a L-dopa decarboxylase (DODC) converting L-dopa into dopamine;
[0137] k) a Tyrosine decarboxylase (TYDC) converting L-dopa into dopamine;
[0138] l) a hydroxyphenylpyruvate decarboxylase (HPPDC) converting 4-HPP into 4-HPPA;
[0139] m) a monoamine oxidase converting dopamine into 3,4-DHPAA;
[0140] n) a norcoclaurine synthase (NCS) converting Dopamine and 4-HPAA into (S)-norcoclaurine;
[0141] o) a 6-O-methyltransferase (6-OMT) converting (S)-norcoclaurine into (S)-Coclaurine and/or norlaudanosoline into (S)-3′-Hydroxy-coclaurine;
[0142] p) a coclaurine-N-methyltransferase (CNMT) converting (S)-Coclaurine into (S)—N-Methylcoclaurine and/or (S)-3′-hydroxycoclaurine into (S)-3′-hydroxy-N-methyl-coclaurine;
[0143] q) a N-methyl-coclaurine hydroxylase (NMCH) converting (S)-Coclaurine into (S)-3′-hydroxycoclaurine and/or (S)—N-Methylcoclaurine into (S)-3′-Hydroxy-N-Methylcoclaurine;
[0144] r) a 3′-hydroxy-N-methyl-(S)-coclaurine 4′-O-methyltransferase (4′-OMT) converting (S)-3′-Hydroxy-N-Methylcoclaurine into (S)-Reticuline;
[0145] s) a 1,2-dehydroreticuline synthase-1,2-dehydroreticuline reductase (DRS-DRR) converting (S)-Reticuline into (R)-reticuline;
[0146] t) a salutaridine synthase (SAS) converting (R)-reticuline into Salutaridine;
[0147] u) a salutaridine reductase (SAR) converting Salutaridine to Salutaridinol;
[0148] v) a salutaridinol 7-O-acetyltransferase (SAT) converting Salutaridinol into 7-O-acetylsalutaridinol;
[0149] w) a thebaine synthase (THS) converting 7-O-acetylsalutaridinol or 7-O-acetylsalutaridinol acetate into thebaine;
[0150] x) a demethylase converting thebaine into oripavine, thebaine into northebaine, oripavine into nororipavine and/or northebaine into nororipavine; and/or
[0151] y) a demethylase-CPR capable of reducing the demethylase of x).

[0152] In some embodiments, the corresponding:
[0153] a) DAHP synthase has at least 20%, such as at least 40%, such as at least 50%, such as at least 60%, such as at least 70%, such as at least 80%, such as at least 90%, such as at least 95%, such as at least 96%, such as at least 97%, such as at least 98%, such as at least 99%, such as 100% identity to the DAHP synthase comprised in SEQ ID NO: 121;
[0154] b) chorismate mutase has at least 20%, such as at least 40%, such as at least 50%, such as at least 60%, such as at least 70%, such as at least 80%, such as at least 90%, such as at least 95%, such as at least 96%, such as at least 97%, such as at least 98%, such as at least 99% identity to the chorismate synthase comprised in SEQ ID NO: 123;
[0155] c) prephenate dehydrogenase (Tyr1) has at least 20%, such as at least 40%, such as at least 50%, such as at least 60%, such as at least 70%, such as at least 80%, such as at least 90%, such as at least 95%, such as at least 96%, such as at least 97%, such as at least 98%, such as at least 99% identity to the DAHP synthase comprised in SEQ ID NO: 125;
[0156] d) Tyrosine Hydroxylase (TH) has at least 20%, such as at least 40%, such as at least 50%, such as at least 60%, such as at least 70%, such as at least 80%, such as at least 90%, such as at least 95%, such as at least 96%, such as at least 97%, such as at least 98%, such as at least 99% identity to the TH comprised in SEQ ID NO: 127;
[0157] e) TH-CPR has at least 20%, such as at least 40%, such as at least 50%, such as at least 60%, such as at least 70%, such as at least 80%, such as at least 90%, such as at least 95%, such as at least 96%, such as at least 97%, such as at least 98%, such as at least 99% identity to the TH-CPR comprised in SEQ ID NO: 129;
[0158] f) DODC has at least 20%, such as at least 40%, such as at least 50%, such as at least 60%, such as at least 70%, such as at least 80%, such as at least 90%, such as at least 95%, such as at least 96%, such as at least 97%, such as at least 98%, such as at least 99% identity to the DODC comprised in SEQ ID NO: 131;
[0159] g) Norcoclaurine synthase (NCS) has at least 20%, such as at least 40%, such as at least 50%, such as at least 60%, such as at least 70%, such as at least 80%, such as at least 90%, such as at least 95%, such as at least 96%, such as at least 97%, such as at least 98%, such as at least 99% identity to the NCS comprised in SEQ ID NO: 133;
[0160] h) 6-OMT has at least 20%, such as at least 40%, such as at least 50%, such as at least 60%, such as at least 70%, such as at least 80%, such as at least 90%, such as at least 95%, such as at least 96%, such as at least 97%, such as at least 98%, such as at least 99% identity to the 6-OMT comprised in SEQ ID NO: 135;
[0161] i) CNMT has at least 20%, such as at least 40%, such as at least 50%, such as at least 60%, such as at least 70%, such as at least 80%, such as at least 90%, such as at least 95%, such as at least 96%, such as at least 97%, such as at least 98%, such as at least 99% identity to the CNMT comprised in SEQ ID NO: 137;
[0162] j) NMCH has at least 20%, such as at least 40%, such as at least 50%, such as at least 60%, such as at least 70%, such as at least 80%, such as at least 90%, such as at least 95%, such as at least 96%, such as at least 97%, such as at least 98%, such as at least 99% identity to the NMCH comprised in SEQ ID NO: 139;
[0163] k) 4′-OMT has at least 20%, such as at least 40%, such as at least 50%, such as at least 60%, such as at least 70%, such as at least 80%, such as at least 90%, such as at least 95%, such as at least 96%, such as at least 97%, such as at least 98%, such as at least 99% identity to the 4′-OMT comprised in SEQ ID NO: 141;
[0164] l) DRS-DRR has at least 20%, such as at least 40%, such as at least 50%, such as at least 60%, such as at least 70%, such as at least 80%, such as at least 90%, such as at least 95%, such as at least 96%, such as at least 97%, such as at least 98%, such as at least 99% identity to the VRS_DDR comprised in SEQ ID NO:143;
[0165] m) SAS has at least 20%, such as at least 40%, such as at least 50%, such as at least 60%, such as at least 70%, such as at least 80%, such as at least 90%, such as at least 95%, such as at least 96%, such as at least 97%, such as at least 98%, such as at least 99% identity to the SAS comprised in SEQ ID NO: 145;
[0166] n) SAT has at least 20%, such as at least 40%, such as at least 50%, such as at least 60%, such as at least 70%, such as at least 80%, such as at least 90%, such as at least 95%, such as at least 96%, such as at least 97%, such as at least 98%, such as at least 99% identity to the SAR comprised in SEQ ID NO: 147;
[0167] o) SAR has at least 20%, such as at least 40%, such as at least 50%, such as at least 60%, such as at least 70%, such as at least 80%, such as at least 90%, such as at least 95%, such as at least 96%, such as at least 97%, such as at least 98%, such as at least 99% identity to the SAT comprised in SEQ ID NO: 149;
[0168] p) THS has at least 20%, such as at least 40%, such as at least 50%, such as at least 60%, such as at least 70%, such as at least 80%, such as at least 90%, such as at least 95%, such as at least 96%, such as at least 97%, such as at least 98%, such as at least 99% identity to the THS comprised in SEQ ID NO: 151;

[0169] q) Demethylase has at least 20%, such as at least 40%, such as at least 50%, such as at least 60%, such as at least 70%, such as at least 80%, such as at least 90%, such as at least 95%, such as at least 96%, such as at least 97%, such as at least 98%, such as at least 99% identity to the demethylase comprised in anyone of SEQ ID NO: 153, 155, 157, 256, or 258 and
[0170] r) Demethylase-CPR has at least 20%, such as at least 40%, such as at least 50%, such as at least 60%, such as at least 70%, such as at least 80%, such as at least 90%, such as at least 95%, such as at least 96%, such as at least 97%, such as at least 98%, such as at least 99% identity to the demethylase-CPR comprised in anyone of SEQ ID NO: 159, 161, or 260.

[0171] Further suitable enzymes of the benzylisoquinoline alkaloid pathway are disclosed in U52019100781, WO2019/165551 and WO2021/069714, which are hereby incorporated by reference in their entirety.

[0172] In a particular embodiment the host cell of the invention, further comprises one or more demethylases converting thebaine into oripavine, thebaine into northebaine, oripavine into nororipavine and/or northebaine into nororipavine; optionally a demethylase which has at least 20%, such as at least 40%, such as at least 50%, such as at least 60%, such as at least 70%, such as at least 80%, such as at least 90%, such as at least 95%, such as at least 96%, such as at least 97%, such as at least 98%, such as at least 99% identity to a demethylase comprised in SEQ ID NO: 153, 155, 157, 256, or 258. Many more demethylases useful in the method and host cell of the present invention is disclosed in WO2021069714, incorporated by reference.

[0173] In some embodiments the conversion rate (unit mass-1 time-1) of one or more pathway enzymes is increased compared to the conversion rate absent any UGT's converting the oripavine and/or nororipavine and the glycosyl donor into the corresponding oripavine glycoside and/or nororipavine glycoside.

[0174] In another embodiment the host cell of the invention expresses one or more heterologous genes encoding transporter protein. The transporter protein of the invention may suitably be any natural or mutant tranporter protein capable of uptake or export in the host cell of a metabolite of the benzylisoquinoline alkaloid pathway disclosed herein, in particular of thebaine, northebaine, oripavine and/or nororipavine and/or their glycosides. Such transporter proteins may be a permease, such as a Purine Uptake Permease (PUP). As one example the transporter protein has at least 20%, such as at least 40%, such as at least 50%, such as at least 60%, such as at least 70%, such as at least 80%, such as at least 90%, such as at least 95%, such as at least 96%, such as at least 97%, such as at least 98%, such as at least 99% identity to the transporter comprised in SEQ ID NO: 224, 226, 228, 230, 232, 234, 236, 238, 240, 242, 244, 246, 248, 250, 252, or 254. In some embodiments, some transporters may reduce production of glycosylated product, eg. by transporting intermediates out of the cell. Expression of such transporters including the transporter comprised in SEQ ID NO: 163 can suitably be knocked out such as described in WO2019243624 to Valorbec. Many more transporters useful in the method and host cell of the present invention is disclosed in WO2021069714 or WO2020/078837, incorporated by reference. In particular for oripavine to nororipavine the demethylation reaction table 14-1 of WO2021069714 details numerous permeases provides over 10-fold improvement of in such demethylation reactions including but not limited to PUPs selected from the group of T109 Gf PUP3 83; T115 Csa PIJ P3 4 8; T116 HanPUP3 56; T122 PsoPUP3 17; T125 JcuPUP3 41; T126 CpePUP3 49; T130 NdoPUP3 89; T132 CmiPUP3 10; T133 PsoPUP3 18; T136 RchPUP3 42; T138 AduPUP3 58; T141 EcaPUP3 88; T142 McoPUP3 4; T143 CmiPUP3; T144 PsoPUP3 19; T149 Ace PU P3 59; T150 PsoPUP3 67; T151 PBLPUP3 75; T152 GRPUP3 87; T154 CmiPUP3 12; T157 RchPUP 36; T161 PsoPUP3 68; T162 PmiPUP3 76; T165 AcoPUP3 13; T168 FvePUP3 37; T169 ZjuPUP3 45; T170 LsaPUP3 53; T172 AcoPUP3 69; T177 PsoPUP3 22; T178 PsoPUP3 30; T180 McoPUP3 46; T181 HanPUP3 54; T182 CpaPUP3 62; T192 CmiPUP3 47; T193 AanPUP3 55; and T195 JcuPUP3 71. In particular PUP's of SEQ ID NO: 234, 236, 224, 226, 238, 240, 242, 228, 230, and 232 are desirable for providing improvements in the demethylase-mediated bioconversion of oripavine to nororipavine for some in the range of 100 to 10.000%, such as 250 to 7.500%, such as 500 to 5000%, such as 750 to 2500%, such as 1000 to 2000%, such as 1400-1662%. Such PUP's have been found to be suitable for use with production of glycosylated nororipavine.

[0175] Functional homologs (also known as functional variants) of the enzymes/polypeptides described herein are also suitable for use when producing oripavine glycosides and/or nororipavine glycosides by the method of the invention. A functional homolog is a polypeptide that has sequence similarity to a reference polypeptide, and that carries out one or more of the biochemical or physiological function(s) of the reference polypeptide. A functional homolog and the reference polypeptide can be a natural occurring polypeptide, and the sequence similarity can be due to convergent or divergent evolutionary events. As such, functional homologs are sometimes designated in the literature as homologs, or orthologs, or paralogs. Variants of a naturally occurring functional homolog, such as polypeptides encoded by mutants of a wild type coding sequence, can themselves be functional homologs. Functional homologs can also be created via site-directed mutagenesis of the coding sequence for a polypeptide, or by combining domains from the coding sequences for different naturally-occurring polypeptides (“domain swapping”). Techniques for modifying genes encoding functional polypeptides described herein are known and include, inter alia, directed evolution techniques, site-directed mutagenesis techniques and random mutagenesis techniques, and can be useful to increase specific activity of a polypeptide, alter substrate specificity, alter expression levels, alter subcellular location, or modify polypeptide-polypeptide interactions in a desired manner. Such modified polypeptides are considered functional homologs. The term “functional homolog” is sometimes applied to the nucleic acid that encodes a functionally homologous polypeptide. Functional homologs can be identified by analysis of nucleotide and polypeptide sequence alignments. For example, performing a query on a database of nucleotide or polypeptide sequences can identify homologs of benzylisoquinoline alkaloid biosynthesis polypeptides. Sequence analysis can involve BLAST, Reciprocal BLAST, or PSI-BLAST analysis of non-redundant databases using a UGT amino acid sequence as the reference sequence. Amino acid sequence is, in some instances, deduced from the nucleotide sequence. Those polypeptides in the database that have greater than 40% sequence identity are candidates for further evaluation for suitability for benzylisoquinoline alkaloid biosynthesis. Amino acid sequence similarity allows for conservative amino acid substitutions, such as substitution of one hydrophobic residue for another or substitution of one polar residue for another. If desired, manual inspection of such candidates can be carried out to narrow the number of candidates to be further evaluated. Manual inspection can be performed by selecting those candidates that appear to have domains present in polypeptides in the benzylisoquinoline alkaloid biosynthetic pathway, e.g., conserved functional domains. In some embodiments, nucleic acids and polypeptides are identified from transcriptome data based on expression levels rather than by using BLAST analysis. Methods for conservative substitution is known to the skilled person, see for example https://www.ncbi.nlm.nih.gov/pmc/articles/PMC1449787/ or https://link.springer.com/article/10.1007/BF02300754. Conserved regions can be identified by locating a region within the primary amino acid sequence of a benzylisoquinoline alkaloid biosynthesis polypeptide that is a repeated sequence, forms some secondary structure (e.g., helices and beta sheets), establishes positively or negatively charged domains, or represents a protein motif or domain. See, e.g., the Pfam web site describing consensus sequences for a variety of protein motifs and domains on for example the World Wide Web at sanger.ac.uk/Software/Pfam/ and pfam.janelia.org/. The information included at the Pfam database is described in Sonnhammer et al. (1998); Sonnhammer et al. (1997); and Bateman et al. (1999). Conserved regions also can be determined by aligning sequences of the same or related polypeptides from closely related species. Closely related species preferably are from the same family. In some embodiments, alignment of sequences from two different species is adequate to identify such homologs. Typically, polypeptides that exhibit at least about 40% amino acid sequence identity are useful to identify conserved regions. Conserved regions of related polypeptides exhibit at least 45% amino acid sequence identity (e.g., at least 50%, at least 60%, at least 70%, at least 80%, or at least 90% amino acid sequence identity). In some embodiments, a conserved region exhibits at least 92%, 94%, 96%, 98%, or 99% amino acid sequence identity. For example, polypeptides suitable for producing oripavine glycosides and/or nororipavine glycosides in the genetically modified host cell of the invention functional homologs of TH's, NCS's, 6-OMT's, CNMT's, NMCH's, 4′-OMT's, DRS-DRR's, SAS's, SAR's, SAT's, THS's, CPR's, demethylating P450's, and UGTs. Methods to modify the substrate specificity of benzylisoquinoline alkaloids pathway enzymes are known to those skilled in the art and include without limitation site-directed/rational mutagenesis approaches, random directed evolution approaches and combinations in which random mutagenesis/saturation techniques are performed near the active site of the enzyme. For example see Osmani et al. (2009). A candidate sequence typically has a length that is from 80% to 200% of the length of the reference sequence, e.g., 82, 85, 87, 89, 90, 93, 95, 97, 99, 100, 105, 110, 115, 120, 130, 140, 150, 160, 170, 180, 190, or 200% of the length of the reference sequence. A functional homolog polypeptide typically has a length that is from 95% to 105% of the length of the reference sequence, e.g., 90, 93, 95, 97, 99, 100, 105, 110, 115, or 120% of the length of the reference sequence, or any range between. It will be appreciated that functional benzylisoquinoline alkaloids pathway enzymes/polypeptides and UGTs can include additional amino acids that are not involved in the enzymatic activities carried out by the enzymes. In some embodiments, such enzymes are fusion proteins. The terms “chimera,” “fusion polypeptide,” “fusion protein,” “fusion enzyme,” “fusion construct,” “chimeric protein,” “chimeric polypeptide,” “chimeric construct,” and “chimeric enzyme” can be used interchangeably herein to refer to proteins engineered through the joining of two or more genes that code for different proteins. In some embodiments, a nucleic acid sequence encoding a benzylisoquinoline alkaloids pathway enzyme/polypeptide can include a tag sequence that encodes a “tag” designed to facilitate subsequent manipulation (e.g., to facilitate purification or detection), secretion, or localization of the encoded enzyme. Tag sequences can be inserted in the nucleic acid sequence encoding the polypeptide such that the encoded tag is located at either the carboxyl or amino terminus of the polypeptide. Non-limiting examples of encoded tags include green fluorescent protein (GFP), human influenza hemagglutinin (HA), glutathione S transferase (GST), polyhistidine-tag (HIS tag), and Flag™ tag (Kodak, New Haven, CT). Other examples of tags include a chloroplast transit peptide, a mitochondrial transit peptide, an amyloplast peptide, signal peptide, or a secretion tag. In some embodiments, a fusion protein is a protein altered by domain swapping. As used herein, the term “domain swapping” is used to describe the process of replacing a domain of a first protein with a domain of a second protein. In some embodiments, the domain of the first protein and the domain of the second protein are functionally identical or functionally similar. In some embodiments, the structure and/or sequence of the domain of the second protein differs from the structure and/or sequence of the domain of the first protein. In some embodiments, a benzylisoquinoline alkaloids pathway enzyme/polypeptide is altered by domain swapping. In some embodiments the fused protein can comprise a glycosyl transferase as described herein fused (optionally by N-terminal fusion) to one or more moieties (anchors) comprising an Endoplasmic Reticulum localization site and providing for keeping the glycosyl transferase in close proximity to an Endoplasmic Reticulum membrane of the host cell, optionally via one or more linker moieties. Such anchors can provide for improved specificity, activity or folding of the glycosyl trasferase or a combination thereof. The fused protein can alternatively or additionally comprise a glycosyl transferase as described herein fused to one or more moieties providing for increased solubility (solubility tags) of the glycosyl transferase, optionally via one or more linker moieties. Such anchors can be either one of the anchor moieties comprised in SEQ ID NO: SEQ ID NO: SEQ ID NO: 172, SEQ ID NO: 174, SEQ ID NO: 176, SEQ ID NO: 178, SEQ ID NO: 180, SEQ ID NO: 182, SEQ ID NO: 184, SEQ ID NO: 186, SEQ ID NO: 188, SEQ ID NO: 190, SEQ ID NO: 192, SEQ ID NO: 194, SEQ ID NO: 196, SEQ ID NO: 198, SEQ ID NO: 200, or SEQ ID NO: 202. Some anchors are particularly useful and beneficial in glycosylation of benzylisoquinoline alkaloid nor compounds like nororipavine, where it can boost the conversion rate considerably. The linker moieties can be either one of the linkers comprised in SEQ ID NO: 172, SEQ ID NO: 174, SEQ ID NO: 176, SEQ ID NO: 178, SEQ ID NO: 180, SEQ ID NO: 182, SEQ ID NO: 184, SEQ ID NO: 186, SEQ ID NO: 188, SEQ ID NO: 190, SEQ ID NO: 192, SEQ ID NO: 194, SEQ ID NO: 196, SEQ ID NO: 198, SEQ ID NO: 200, or SEQ ID NO: 202, while the solubility tag can be either one of the tags comprised in SEQ ID NO: 204, SEQ ID NO: 206, SEQ ID NO: 208, SEQ ID NO: 210, SEQ ID NO: 212, SEQ ID NO: 214, SEQ ID NO: 216, SEQ ID NO: 218, SEQ ID NO: 220, or SEQ ID NO: 222. In further additional or alternative embodiments surprisingly high production of glycosylated benzylisoquinoline alkaloid nor compounds like nororipavine can be achieved in host cell described herein comprising both a glycosyl transferase, optionally comprised in anyone of SEQ ID NO: 172, SEQ ID NO: 174, SEQ ID NO: 176, SEQ ID NO: 178, SEQ ID NO: 180, SEQ ID NO: 182, SEQ ID NO: 184, SEQ ID NO: 186, SEQ ID NO: 188, SEQ ID NO: 190, SEQ ID NO: 192, SEQ ID NO: 194, SEQ ID NO: 196, SEQ ID NO: 198, SEQ ID NO: 200, SEQ ID NO: 202, SEQ ID NO: SEQ ID NO: SEQ ID NO: 204, SEQ ID NO: 206, SEQ ID NO: 208, SEQ ID NO: 210, SEQ ID NO: 212, SEQ ID NO: 214, SEQ ID NO: 216, SEQ ID NO: 218, SEQ ID NO: 220, or SEQ ID NO: 222, and a transporter, optionally comprised in anyone of SEQ ID NO: 224, 226, 228, 230, 232, 234, 236, 238, 240, 242, 244, 246, 248, 250, 252, or 254.

[0176] In further embodiments the host cell of the invention expresses one or more genes selected from the group of:
[0177] a) one or more polynucleotides which is at least 20%, such as at least 40%, such as at least 50%, such as at least 60%, such as at least 70%, such as at least 80%, such as at least 90%, such as at least 95%, such as at least 96%, such as at least 97%, such as at least 98%, such as at least 99% identical to the DAHP synthase encoding polynucleotide comprised in SEQ ID NO: 122 or genomic DNA thereof;
[0178] b) one or more polynucleotides which is at least 20%, such as at least 40%, such as at least 50%, such as at least 60%, such as at least 70%, such as at least 80%, such as at least 90%, such as at least 95%, such as at least 96%, such as at least 97%, such as at least 98%, such as at least 99% identical to the chorismate mutase encoding polynucleotide comprised in SEQ ID NO: 124 or genomic DNA thereof;
[0179] c) one or more polynucleotides which is at least 20%, such as at least 40%, such as at least 50%, such as at least 60%, such as at least 70%, such as at least 80%, such as at least 90%, such as at least 95%, such as at least 96%, such as at least 97%, such as at least 98%, such as at least 99% identical to the prephenate dehydrogenase encoding polynucleotide comprised in SEQ ID NO: 126 or genomic DNA thereof;
[0180] d) one or more polynucleotides which is at least 20%, such as at least 40%, such as at least 50%, such as at least 60%, such as at least 70%, such as at least 80%, such as at least 90%, such as at least 95%, such as at least 96%, such as at least 97%, such as at least 98%, such as at least 99% identical to the TH encoding polynucleotide comprised in SEQ ID NO: 128 or genomic DNA thereof;
[0181] e) one or more polynucleotides which is at least 20%, such as at least 40%, such as at least 50%, such as at least 60%, such as at least 70%, such as at least 80%, such as at least 90%, such as at least 95%, such as at least 96%, such as at least 97%, such as at least 98%, such as at least 99% identical to the TH-CPR encoding polynucleotide comprised in SEQ ID NO: 130 or genomic DNA thereof;
[0182] f) one or more polynucleotides which is at least 20%, such as at least 40%, such as at least 50%, such as at least 60%, such as at least 70%, such as at least 80%, such as at least 90%, such as at least 95%, such as at least 96%, such as at least 97%, such as at least 98%, such as at least 99% identical to the DODC encoding polynucleotide comprised in SEQ ID NO: 132 genomic DNA thereof;
[0183] g) one or more polynucleotides which is at least 20%, such as at least 40%, such as at least 50%, such as at least 60%, such as at least 70%, such as at least 80%, such as at least 90%, such as at least 95%, such as at least 96%, such as at least 97%, such as at least 98%, such as at least 99% identical to the NCS encoding polynucleotide comprised in SEQ ID NO: 134 or genomic DNA thereof;
[0184] h) one or more polynucleotides which is at least 20%, such as at least 40%, such as at least 50%, such as at least 60%, such as at least 70%, such as at least 80%, such as at least 90%, such as at least 95%, such as at least 96%, such as at least 97%, such as at least 98%, such as at least 99% identical to the 6-OMT encoding polynucleotide comprised in SEQ ID NO: 136 or genomic DNA thereof;
[0185] i) one or more polynucleotides which is at least 20%, such as at least 40%, such as at least 50%, such as at least 60%, such as at least 70%, such as at least 80%, such as at least 90%, such as at least 95%, such as at least 96%, such as at least 97%, such as at least 98%, such as at least 99% identical to the CNMT encoding polynucleotide comprised in SEQ ID NO: 138 or genomic DNA thereof;
[0186] j) one or more polynucleotides which is at least 20%, such as at least 40%, such as at least 50%, such as at least 60%, such as at least 70%, such as at least 80%, such as at least 90%, such as at least 95%, such as at least 96%, such as at least 97%, such as at least 98%, such as at least 99% identical to the NMCH encoding polynucleotide comprised in SEQ ID NO: 140 or genomic DNA thereof;
[0187] k) one or more polynucleotides which is at least 20%, such as at least 40%, such as at least 50%, such as at least 60%, such as at least 70%, such as at least 80%, such as at least 90%, such as at least 95%, such as at least 96%, such as at least 97%, such as at least 98%, such as at least 99% identical to the 4′-OMT encoding polynucleotide comprised in SEQ ID NO: 142 or genomic DNA thereof;
[0188] l) one or more polynucleotides which is at least 20%, such as at least 40%, such as at least 50%, such as at least 60%, such as at least 70%, such as at least 80%, such as at least 90%, such as at least 95%, such as at least 96%, such as at least 97%, such as at least 98%, such as at least 99% identical to the DRS-DRR encoding polynucleotide comprised in SEQ ID NO: 144 or genomic DNA thereof;
[0189] m) one or more polynucleotides which is at least 20%, such as at least 40%, such as at least 50%, such as at least 60%, such as at least 70%, such as at least 80%, such as at least 90%, such as at least 95%, such as at least 96%, such as at least 97%, such as at least 98%, such as at least 99% identical to the SAS encoding polynucleotide comprised in SEQ ID NO: 146 or genomic DNA thereof;
[0190] n) one or more polynucleotides which is at least 20%, such as at least 40%, such as at least 50%, such as at least 60%, such as at least 70%, such as at least 80%, such as at least 90%, such as at least 95%, such as at least 96%, such as at least 97%, such as at least 98%, such as at least 99% identical to the SAT encoding polynucleotide comprised in SEQ ID NO: 148 or genomic DNA thereof;
[0191] o) one or more polynucleotides which is at least 20%, such as at least 40%, such as at least 50%, such as at least 60%, such as at least 70%, such as at least 80%, such as at least 90%, such as at least 95%, such as at least 96%, such as at least 97%, such as at least 98%, such as at least 99% identical to the SAR encoding polynucleotide comprised in SEQ ID NO: 150 or genomic DNA thereof;
[0192] p) one or more polynucleotides which is at least 20%, such as at least 40%, such as at least 50%, such as at least 60%, such as at least 70%, such as at least 80%, such as at least 90%, such as at least 95%, such as at least 96%, such as at least 97%, such as at least 98%, such as at least 99% identical to the THS encoding polynucleotide comprised in SEQ ID NO: 152 or genomic DNA thereof;
[0193] q) one or more polynucleotides which is at least 20%, such as at least 40%, such as at least 50%, such as at least 60%, such as at least 70%, such as at least 80%, such as at least 90%, such as at least 95%, such as at least 96%, such as at least 97%, such as at least 98%, such as at least 99% identical to the demethylase encoding polynucleotide comprised in anyone of SEQ ID NO: 154, 156, 158, 255, or 257 or genomic DNA thereof;
[0194] r) one or more polynucleotides which is at least 20%, such as at least 40%, such as at least 50%, such as at least 60%, such as at least 70%, such as at least 80%, such as at least 90%, such as at least 95%, such as at least 96%, such as at least 97%, such as at least 98%, such as at least 99% identical to the demethylase-CPR encoding polynucleotide comprised in any one of SEQ ID NO: 160, 162, or 259 or genomic DNA thereof; and
[0195] s) one or more polynucleotides which is at least 20%, such as at least 40%, such as at least 50%, such as at least 60%, such as at least 70%, such as at least 80%, such as at least 90%, such as at least 95%, such as at least 96%, such as at least 97%, such as at least 98%, such as at least 99% identical to the transporter encoding polynucleotide comprised in SEQ ID NO: 223, 225, 227, 229, 231, 233, 235, 237, 239, 241, 243, 245, 247, 249, 251, or 253 or genomic DNA thereof.

[0196] Any gene disclosed herein may be codon optimized for expression in a particular selected host using methods available to the skilled person or commercially available from technology providers—see for example Gene Reports (2017), incorporated herein by reference.

[0197] The host cell of the invention may be any host cell suitable for hosting and expressing the UGT's glycosylating the oripavine acceptor and/or nororipavine acceptor and optionally other polypeptides of the operative biosynthetic pathways producing the oripavine acceptor and/or nororipavine acceptor. In particular the host cell of the invention may be a eukaryote cell selected from the group consisting of mammalian, insect, plant, or fungal cells. In another embodiment the cell is a fungal cell selected from the phylas consisting of Ascomycota, Basidiomycota, Neocallimastigomycota, Glomeromycota, Blastocladiomycota, Chytridiomycota, Zygomycota, Oomycota and Microsporidia. A particularly useful fungal cell is a yeast cell selected from the group consisting of ascosporogenous yeast (Endomycetales), basidiosporogenous yeast, and Fungi Imperfecti yeast (Blastomycetes). Such yeast cells may further be selected from the genera consisting of Saccharomyces, Kluveromyces, Candida, Pichia, Debaromyces, Hansenula, Yarrowia, Zygosaccharomyces, and Schizosaccharomyces. More specifically the yeast cell may be selected from the species consisting of Kluyveromyces lactis, Saccharomyces carlsbergensis, Saccharomyces cerevisiae, Saccharomyces diastaticus, Saccharomyces douglasii, Saccharomyces kluyveri, Saccharomyces norbensis, Saccharomyces oviformis, and Yarrowia lipolytica.

[0198] An alternative fungal host cell of the invention is a filamentous fungal cell. Such filamentous fungal cell may be selected from the phylas consisting of Ascomycota, Eumycota and Oomycota, more specifically selected from the genera consisting of Acremonium, Aspergillus, Aureobasidium, Bjerkandera, Ceriporiopsis, Chrysosporium, Coprinus, Corio/us, Cryptococcus, Filibasidium, Fusarium, Humicola, Magnaporthe, Mucor, Myceliophthora, Neocallimastix, Neurospora, Paecilomyces, Penicillium, Phanerochaete, Phlebia, Piromyces, Pleurotus, Schizophyllum, Talaromyces, Thermoascus, Thielavia, Tolypocladium, Trametes, and Trichoderma. In important embodiments the filamentous fungal cell may be selected from the species consisting of Aspergillus awamori, Aspergillus foetidus, Aspergillus fumigatus, Aspergillus japonicus, Aspergillus nidulans, Aspergillus niger, Aspergillus oryzae, Bjerkandera adusta, Ceriporiopsis aneirina, Ceriporiopsis caregiea, Ceriporiopsis gilvescens, Ceriporiopsis pannocinta, Ceriporiopsis rivulosa, Ceriporiopsis subrufa, Ceriporiopsis subvermispora, Chrysosporiuminops, Chrysosporiumkeratinophilum, Chrysosporium lucknowense, Chrysosporium merdarium, Chrysosporium pannicola, Chrysosporium queenslandicum, Chrysosporium tropicum, Chrysosporium zonatum, Coprinus cinereus, Coriolus hirsutus, Fusarium bactridioides, Fusarium cerealis, Fusarium crookwellense, Fusarium culmorum, Fusarium graminearum, Fusarium graminum, Fusarium heterosporum, Fusarium negundi, Fusarium oxysporum, Fusarium reticulatum, Fusarium roseum, Fusarium sambucinum, Fusarium sarcochroum, Fusarium sporotrichioides, Fusarium sulphureum, Fusarium torulosum, Fusarium trichothecioides, Fusarium venenatum, Humicola insolens, Humicola lanuginosa, Mucor miehei, Myceliophthora thermophila, Neurospora crassa, Penicillium purpurogenum, Phanerochaete chrysosporium, Phlebia radiata, Pleurotus eryngii, Thielavia terrestris, Trametes villosa, Trametes versicolor, Trichoderma harzianum, Trichoderma koningii, Trichoderma longibrachiatum, Trichoderma reesei, and Trichoderma viride.

[0199] In one embodiment the cell is a plant cell for example of the genus Physcomitrella or Papaver, in particular Papaver somniferum. Other plant cells can be of the family Solanaceae, such genuses of Nicotiana, such as Nicotiana benthamiana. In addition to plant cells the invention also provides an isolated plant, e.g., a transgenic plant, plant part comprising the benzylisoquinoline alkaloid pathway polypeptides of the invention and producing the benzylisoquinoline alkaloids of the invention in useful quantities. The compound may be recovered from the plant or plant part. The transgenic plant can be dicotyledonous (a dicot) or monocotyledonous (a monocot). Examples of monocot plants are grasses, such as meadow grass (blue grass, Poa), forage grass such as Festuca, Lolium, temperate grass, such as Agrostis, and cereals, e.g., wheat, oats, rye, barley, rice, sorghum, and maize (corn). Examples of dicot plants are tobacco, legumes, such as lupins, potato, sugar beet, pea, bean and soybean, and cruciferous plants (family Brassicaceae), such as cauliflower, rape seed, and the closely related model organism Arabidopsis thaliana. Examples of plant parts are stem, callus, leaves, root, fruits, seeds, and tubers as well as the individual tissues comprising these parts, e.g., epidermis, mesophyll, parenchyme, vascular tissues, meristems. Specific plant cell compartments, such as chloroplasts, apoplasts, mitochondria, vacuoles, peroxisomes and cytoplasm are also considered to be a plant part. Furthermore, any plant cell, whatever the tissue origin, is considered to be a plant part. Likewise, plant parts such as specific tissues and cells isolated to facilitate the utilization of the invention are also considered plant parts, e.g., embryos, endosperms, aleurone and seed coats. Also included within the scope of the present invention is any the progeny of such plants, plant parts, and plant cells. The transgenic plant or plant cells comprising the operative pathway of the invention and produce the compound of the invention may be constructed in accordance with methods known in the art. In short, the plant or plant cell is constructed by incorporating one or more expression vectors of the invention into the plant host genome or chloroplast genome and propagating the resulting modified plant or plant cell into a transgenic plant or plant cell. The expression vector conveniently comprises the polynucleotide construct of the invention. The choice of regulatory sequences, such as promoter and terminator sequences and optionally signal or transit sequences, is determined, for example, on the basis of when, where, and how the pathway polypeptides is desired to be expressed. For instance, the expression of a gene encoding a pathway enzyme polypeptide may be constitutive or inducible, or may be developmental, stage or tissue specific, and the gene product may be targeted to a specific tissue or plant part such as seeds or leaves. Regulatory sequences are, for example, described by Tague et al., 1988, Plant Physiology 86: 506. For constitutive expression, the 358-CaMV, the maize ubiquitin 1, or the rice actin 1 promoter may be used (Franck et al., 1980, Cell 21: 285-294; Christensen et al., 1992, Plant Mol. Biol. 18: 675-689; Zhang et al., 1991, Plant Cell 3: 1155-1165). Organ-specific promoters may be, for example, a promoter from storage sink tissues such as seeds, potato tubers, and fruits (Edwards and Coruzzi, 1990, Ann. Rev. Genet. 24: 275-303), or from metabolic sink tissues such as meristems (Ito et al., 1994, Plant Mol. Biol. 24: 863-878), a seed specific promoter such as the glutelin, prolamin, globulin, or albumin promoter from rice (Wu et al., 1998, Plant Cell Physiol. 39: 885-889), a Vicia faba promoter from the legumin B4 and the unknown seed protein gene from Vicia faba (Conrad et al., 1998, J. Plant Physiol. 152: 708-711), a promoter from a seed oil body protein (Chen et al., 1998, Plant Cell Physiol. 39: 935-941), the storage protein napA promoter from Brassica napus, or any other seed specific promoter known in the art, e.g., as described in WO 91/14772. Furthermore, the promoter may be a leaf specific promoter such as the rbcs promoter from rice or tomato (Kyozuka et al., 1993, Plant Physiol. 102: 991-1000), the chlorella virus adenine methyltransferase gene promoter (Mitra and Higgins, 1994, Plant Mol. Biol. 26: 85-93), the aldP gene promoter from rice (Kagaya et al., 1995, Mol. Gen. Genet. 248: 668-674), or a wound inducible promoter such as the potato pint promoter (Xu et al., 1993, Plant Mol. Biol. 22: 573-588). Likewise, the promoter may be induced by abiotic treatments such as temperature, drought, or alterations in salinity or induced by exogenously applied substances that activate the promoter, e.g., ethanol, oestrogens, plant hormones such as ethylene, abscisic acid, and gibberellic acid, and heavy metals. A promoter enhancer element may also be used to achieve higher expression in the plant. For instance, the promoter enhancer element may be an intron that is placed between the promoter and the polynucleotide encoding a polypeptide or domain. For instance, Xu et al., 1993, supra, disclose the use of the first intron of the rice actin 1 gene to enhance expression. The selectable marker gene and any other parts of the expression construct may be chosen from those available in the art. The polynucleotide construct or expression vector is incorporated into the plant genome according to conventional techniques known in the art, including Agrobacterium-mediated transformation, virus-mediated transformation, microinjection, particle bombardment, biolistic transformation, and electroporation (Gasser et al., 1990, Science 244: 1293; Potrykus, 1990, Bio/Technology 8: 535; Shimamoto et al., 1989, Nature 338: 274). Agrobacterium tumefaciens-mediated gene transfer is a method for generating transgenic dicots (for a review, see Hooykas and Schilperoort, 1992, Plant Mol. Biol. 19: 15-38) and for transforming monocots, although other transformation methods may be used for these plants. A method for generating transgenic monocots is particle bombardment (microscopic gold or tungsten particles coated with the transforming DNA) of embryonic calli or developing embryos (Christou, 1992, Plant J. 2: 275-281; Shimamoto, 1994, Curr. Opin. Biotechnol. 5: 158-162; Vasil et al., 1992, Bio/Technology 10: 667-674). An alternative method for transformation of monocots is based on protoplast transformation as described by Omirulleh et al., 1993, Plant Mo/. Biol. 21: 415-428. Additional transformation methods include those described in U.S. Pat. Nos. 6,395,966 and 7,151,204 (both incorporated herein by reference in their entirety). Following transformation, the transformants having incorporated the expression vector or polynucleotide construct of the invention are selected and regenerated into whole plants according to methods well known in the art. Often the transformation procedure is designed for the selective elimination of selection genes either during regeneration or in the following generations by using, for example, co-transformation with two separate T-DNA constructs or site specific excision of the selection gene by a specific recombinase. In addition to direct transformation of a particular plant genotype with a polynucleotide construct of the invention, transgenic plants may be made by crossing a plant comprising the construct to a second plant lacking the construct. For example, a polynucleotide construct encoding a glycosyl transferease of the invention can be introduced into a particular plant variety by crossing, without the need for ever directly transforming a plant of that given variety. Therefore, the invention encompasses not only a plant directly regenerated from cells which have been transformed in accordance with the invention, but also the progeny of such plants. As used herein, progeny may refer to the offspring of any generation of a parent plant prepared in accordance with the present invention. Such progeny may include a polynucleotide construct of the invention. Crossing results in the introduction of a transgene into a plant line by cross pollinating a starting line with a donor plant line. Non-limiting examples of such steps are described in U.S. Pat. No. 7,151,204. Plants may be generated through a process of backcross conversion. For example, plants include plants referred to as a backcross converted genotype, line, inbred, or hybrid. Genetic markers may be used to assist in the introgression of one or more transgenes of the invention from one genetic background into another. Marker assisted selection offers advantages relative to conventional breeding in that it can be used to avoid errors caused by phenotypic variations. Further, genetic markers may provide data regarding the relative degree of elite germplasm in the individual progeny of a particular cross. For example, when a plant with a desired trait which otherwise has a non-agronomically desirable genetic background is crossed to an elite parent, genetic markers may be used to select progeny which not only possess the trait of interest, but also have a relatively large proportion of the desired germplasm. In this way, the number of generations required to introgress one or more traits into a particular genetic background is minimized.

[0200] The host cell of the invention may, depending on the choice of strain be even further modified by one or more of
[0201] a) attenuating, disrupting and/or deleting one or more native or endogenous genes of the cell;
[0202] b) Overexpressing polynucleotides encoding the UGTs and optionally one or more of the polypeptides comprised in the operative metabolic pathway of the invention by inserting two or more copies of the respective coding genes;
[0203] c) increasing the amount of a substrate for at least one polypeptide of the operative metabolic pathway; and/or
[0204] d) increasing tolerance towards one or more substrates, intermediates, or product molecules from the operative metabolic pathway.

[0205] Useful host cell may have one or more native or endogenous genes attenuated, disrupted and/or deleted. Where the host cell is a yeast strain is is useful to attenuate, disrupt and/or delete one or more dehydrogenases or reductases native to the host cell, particularly those comprised in anyone of SEQ ID NO: 165 or 167 or any of its paralogs or orthologs having at least 20%, such as at least 40%, such as at least 50%, such as at least 60%, such as at least 70%, such as at least 80%, such as at least 90%, such as at least 95%, such as at least 96%, such as at least 97%, such as at least 98%, such as at least 99% identity to anyone of SEQ ID NO: 165 or 167. The expressed UGT amy also suitably be absent a signal peptide targeting the UGT for secretion.

### Gene Constructs and Expression Vectors

[0206] In a separate aspect the invention also disclosed herein are polynucleotide constructs comprising a polynucleotide sequence encoding a UGT or polypeptide comprised in the operative metabolic pathway of the invention operably linked to one or more control sequences, which direct heterologous expression of the UGT or pathway polypeptide in the host cell harbouring the polynucleotide construct. Conditions for the expression should be compatible with the control sequences. In particular, the control sequence is heterologous to the UGT or pathway polypeptide and in one embodiment the polynucleotide sequence encoding the UGT or pathway polypeptide and the control sequence are both heterologous to the host cell comprising the construct. In one embodiment the polynucleotide construct is an expression vector, comprising the polynucleotide sequence encoding the heterologous enzyme or transporter protein of the invention operably linked to the one or more control sequences.

[0207] Polynucleotides may be manipulated in a variety of ways allow expression of the heterologous enzyme or transporter protein. Manipulation of the polynucleotide prior to its insertion into an expression vector may be desirable or necessary depending on the expression vector. The techniques for modifying polynucleotides utilizing recombinant DNA methods are well known in the art.

[0208] The control sequence may be a promoter, which is a polynucleotide that is recognized by a host cell for expression of a polynucleotide. The promoter contains transcriptional control sequences that mediate the expression of the polypeptide. The promoter may be any polynucleotide that shows transcriptional activity in the host cell including mutant, truncated, and hybrid promoters, and may be obtained from genes encoding extracellular or intracellular polypeptides either homologous or heterologous to the host cell. The promoter may also be an inducible promoter.

[0209] Examples of suitable promoters for directing transcription of the nucleic acid construct of the invention in fungal host cell are promoters obtained from the genes for Aspergillus nidulans acetamidase, Aspergillus niger neutral α-amylase, Aspergillus niger acid stable α-amylase, Aspergillus niger or Aspergillus awamori glucoamylase (glaA), Aspergillus gpdA promoter, Aspergillus oryzae TAKA amylase, Aspergillus oryzae alkaline protease, Aspergillus oryzae triose phosphate isomerase, A. niger or A. awamori endoxylanase (xlnA) or β-xylosidase (xlnD), Fusarium oxysporum trypsin-like protease (WO 96/00787), Fusarium venenatum amyloglucosidase (WO2000/56900), Fusarium venenatum Dania (WO 00/56900), Fusarium venenatum Quinn (WO 00/56900), Rhizomucor miehei lipase, Rhizomucor miehei aspartic proteinase, Trichoderma reesei β-glucosidase, Trichoderma reesei cellobiohydrolase I, Trichoderma reesei cellobiohydrolase II, Trichoderma reesei endoglucanase I, Trichoderma reesei endoglucanase II, Trichoderma reesei endoglucanase III, Trichoderma reesei endoglucanase IV, Trichoderma reesei endoglucanase V, Trichoderma reesei xylanase I, Trichoderma reesei xylanase II, Trichoderma reesei β-xylosidase, as well as the NA2-tpi promoter and mutant, truncated, and hybrid promoters thereof. NA2-tpi promoter is a modified promoter from an Aspergillus neutral α-amylase gene in which the untranslated leader has been replaced by an untranslated leader from an Aspergillus triose phosphate isomerase gene. Examples of such promoters include modified promoters from an Aspergillus niger neutral α-amylase gene in which the untranslated leader has been replaced by an untranslated leader from an Aspergillus nidulans or Aspergillus oryzae triose phosphate isomerase gene. Other examples of promoters are the promoters described in WO2006/092396, WO2005/100573 and WO2008/098933, incorporated herein by reference.

[0210] Examples of suitable promoters for directing transcription of the nucleic acid construct of the invention in a yeast host include the glyceraldehyde-3-phosphate dehydrogenase promoter, PgpdA or promoters obtained from the genes for Saccharomyces cerevisiae enolase (EN0-1), Saccharomyces cerevisiae galactokinase (GAL1), Saccharomyces cerevisiae alcohol dehydrogenase/glyceraldehyde-3-phosphate dehydrogenase (ADH1, ADH2/GAP), Saccharomyces cerevisiae triose phosphate isomerase (TPI), Saccharomyces cerevisiae metallothionein (CUP1), and Saccharomyces cerevisiae 3-phosphoglycerate kinase. Other useful promoters for yeast host cells are described by Romanos et al., 1992, Yeast 8: 423-488. Selecting a suitable promoter for expression in yeast is well know and is well understood by persons skilled in the art.

[0211] The control sequence may also be a transcription terminator, which is recognized by a host cell to terminate transcription. The terminator is operably linked to the 3′-terminus of the polynucleotide encoding the polypeptide. Any terminator that is functional in the host cell may be used.

[0212] Useful terminators for fungal host cells can be obtained from the genes encoding Aspergillus nidulans anthranilate synthase, Aspergillus niger glucoamylase, Aspergillus niger α-glucosidase, Aspergillus oryzae TAKA amylase, and Fusarium oxysporum trypsin-like protease; while useful terminators for yeast host cells can be obtained from the genes for Saccharomyces cerevisiae enolase, Saccharomyces cerevisiae cytochrome C (CYC1), and Saccharomyces cerevisiae glyceraldehyde-3-phosphate dehydrogenase. Other useful terminators for yeast host cells are described by Romanos et al., 1992, supra.

[0213] The control sequence may also be an mRNA stabilizer region downstream of a promoter and upstream of the coding sequence of a gene which increases expression of the gene.

[0214] The control sequence may also be a leader, a non-translated region of an mRNA that is important for translation by the host cell. The leader is operably linked to the 5′-terminus of the polynucleotide encoding the polypeptide. Any leader that is functional in the host cell may be used.

[0215] Useful leaders for fungal host cells can be obtained from the genes for Aspergillus oryzae TAKA amylase and Aspergillus nidulans triose phosphate isomerase, while useful leaders for yeast host cells can be obtained from the genes for Saccharomyces cerevisiae enolase (EN0-1), Saccharomyces cerevisiae 3-phosphoglycerate kinase, Saccharomyces cerevisiae α-factor, and Saccharomyces cerevisiae alcohol dehydrogenase/glyceraldehyde-3-phosphate dehydrogenase (ADH2/GAP).

[0216] The control sequence may also be a polyadenylation sequence; a sequence operably linked to the 3′-terminus of the polynucleotide and, when transcribed, is recognized by the host cell as a signal to add polyadenosine residues to transcribed mRNA. Any polyadenylation sequence that is functional in the host cell may be used. Useful polyadenylation sequences for fungal host cells can be obtained from the genes for Aspergillus nidulans anthranilate synthase, Aspergillus niger glucoamylase, Aspergillus niger α-glucosidase Aspergillus oryzae TAKA amylase, and Fusarium oxysporum trypsin-like protease; while useful polyadenylation sequences for yeast host cells are described by Guo and Sherman, 1995, Mol. Cellular Biol. 15: 5983-5990.

[0217] It may also be desirable to add regulatory sequences that regulate expression of the polypeptide relative to the growth of the host cell. Examples of regulatory systems are those that cause expression of the gene to be turned on or off in response to a chemical or physical stimulus, including the presence of a regulatory compound. In fungi, the Aspergillus niger glucoamylase promoter, Aspergillus oryzae TAKA α-amylase promoter, and Aspergillus oryzae glucoamylase promoter may be used; while in yeast, the ADH2 system or GAL 1 system may be used. Other examples of regulatory sequences are those that allow for gene amplification. In eukaryotic systems, these regulatory sequences include the dihydrofolate reductase gene that is amplified in the presence of methotrexate, and the metallothionein genes that are amplified with heavy metals.

[0218] Various nucleotide sequences in addition to the polynucleotide construct of the invention may be joined together to produce a recombinant expression vector, which may include one or more convenient restriction sites to allow for insertion or substitution of the polynucleotide sequence encoding the P450 of the invention at such sites. The recombinant expression vector may be any vector (e.g., a plasmid or virus or chromosomal) that can be conveniently subjected to recombinant DNA procedures and can bring about expression of the P450 encoding polynucleotide. The choice of the vector will typically depend on the compatibility of the vector with the host cell into which the vector is to be introduced. The vector may be an autonomously replicating vector, i.e., a vector that exists as an extrachromosomal entity, the replication of which is independent of chromosomal replication, e.g., a plasmid (linear or closed circular plasmid), an extrachromosomal element, a minichromosome, or an artificial chromosome. The vector may contain any means for assuring self-replication. Alternatively, the vector may, when introduced into the host cell, integrate into the genome and replicate together with the chromosome(s) into which it has been integrated. Furthermore, a single vector or plasmid or two or more vectors or plasmids that together contain the total DNA to be introduced into the genome of the host cell, or a transposon, may be used.

[0219] The vector may contain one or more selectable markers that permit easy selection of transformed, transfected, transduced, or the like cells. A selectable marker is a gene from which the product provides for biocide or viral resistance, resistance to heavy metals, prototrophy to auxotrophs, and the like. Useful selectable markers for fungal host cells include amdS (acetamidase), argB (ornithine carbamoyltransferase), bar (phosphinothricin acetyltransferase), hph (hygromycin phosphotransferase), niaD (nitrate reductase), pyrG (orotidine-5′-phosphate decarboxylase), sC (sulfate adenyltransferase), and trpC (anthranilate synthase), as well as equivalents thereof. Useful selectable markers for yeast host cells include, but are not limited to, ADE2, HIS3, LEU2, LYS2, MET3, TRP1, and URA3.

[0220] The vector may further contain element(s) that permits integration of the vector into genome of the host cell or permits autonomous replication of the vector in the cell independent of the genome. For integration into the host cell genome, the vector may rely on the polynucleotide encoding the P450 or any other element of the vector for integration into the genome by homologous or non-homologous recombination. Alternatively, the vector may contain additional polynucleotides for directing integration by homologous recombination into the genome of the host cell at precise location(s) in the chromosome(s). To increase the likelihood of integration at a precise location, the integrational elements should contain a sufficient number of nucleic acids, such as 100 to 10,000 base pairs, such as 400 to 10,000 base pairs, and such as 800 to 10,000 base pairs, which have a high degree of sequence identity to the corresponding target sequence to enhance the probability of homologous recombination. The integrational elements may be any sequence that is homologous with the target sequence in the genome of the host cell. Furthermore, the integrational elements may be non-encoding or encoding polynucleotides. On the other hand, the vector may be integrated into the genome of the host cell by non-homologous recombination.

[0221] For autonomous replication, the vector may further comprise an origin of replication enabling the vector to replicate autonomously in the host cell in question. The origin of replication may be any plasmid replicator mediating autonomous replication that functions in a cell. The term “origin of replication” or “plasmid replicator” refers to a polynucleotide that enables a plasmid or vector to replicate in vivo. Useful origins of replication for fungal cells include AMA 1 and ANSI. (Gems et al., 1991, Gene 98: 61-67; Cullen et al., 1987, Nucleic Acids Res. 15: 9163-9175; WO 00/24883). Isolation of the AMA 1 sequence and construction of plasmids or vectors comprising the gene can be accomplished using the methods disclosed in WO2000/24883. Useful origins of replication for yeast host cells are the 2-micron origin of replication, ARS1, ARS4, the combination of ARS1 and CEN3, and the combination of ARS4 and CEN6.

[0222] As mentioned, supra, more than one copy of a polynucleotide encoding the UGT or pathway polypeptide of the invention may be inserted into a host cell to increase production of the UGT or pathway polypeptide. An increase in the copy number can be obtained by integrating one or more additional copies of the enzyme coding sequence into the host cell genome or by including an amplifiable selectable marker gene with the polynucleotide, so that cells containing amplified copies of the selectable marker gene—and thereby additional copies of the polynucleotide—can be selected by cultivating the cells in the presence of the appropriate selectable agent. The procedures used to ligate the elements described above to construct the recombinant expression vectors of the present disclosure are well known to one skilled in the art (see, e.g., Green & Sambrook, 2012, Molecular cloning: A laboratory Manual, Fourth Edition, Cold Spring Harbor Laboratory, New York, USA).

[0223] In alignment with the above also disclosed herein is microbial host cell comprising the polynucleotide construct as described, supra.

### Cell Cultures

[0224] The invention also provides a cell culture, comprising any host cell of the invention and a growth medium. Suitable growth mediums for host cells such as mammalian, insect, plant, fungal and/or yeast cells are known in the art.

### Fermentation Methods

[0225] Where the method of the invention is wholly or partially performed by fermenting a cell culture of the the genetically modified host cell of the invention, the method claims suitably further comprise:
[0226] a) culturing the cell culture of invention at conditions allowing the host cell to produce the oripavine glycoside and/or nororipavine glycoside;
[0227] b) optionally deglycosylating the oripavine glycoside and/or nororipavine glycoside into an oripavine aglycone and/or nororipavine aglycone; and
[0228] c) optionally recovering and/or isolating the oripavine glycoside and/or nororipavine glycoside and/or the oripavine aglycone and/or nororipavine aglycone.

[0229] The cell culture can be cultivated in a nutrient medium and at conditions suitable for production of the oripavine glycoside and/or nororipavine glycoside of the invention and/or propagating cell count using methods known in the art. For example, the culture may be cultivated by shake flask cultivation, or small-scale or large-scale fermentation (including continuous, batch, fed-batch, feed and draw, or solid-state fermentations) in laboratory or industrial fermentors in a suitable medium and under conditions allowing the host cells to grow and/or propagate, optionally to be recovered and/or isolated.

[0230] The cultivation can take place in a suitable nutrient medium comprising carbon and nitrogen sources and inorganic salts, using procedures known in the art. Suitable media are available from commercial suppliers or may be prepared according to published recipes (e.g. from catalogues of the American Type Culture Collection). The selection of the appropriate medium may be based on the choice of host cell and/or based on the regulatory requirements for the host cell. Such media are available in the art. The medium may, if desired, contain additional components favoring the transformed expression hosts over other potentially contaminating microorganisms. Accordingly, in an embodiment a suitable nutrient medium comprises a carbon source (e.g. glucose, maltose, molasses, starch, cellulose, xylan, pectin, lignocellolytic biomass hydrolysate, etc.), a nitrogen source (e. g. ammonium sulphate, ammonium nitrate, ammonium chloride, etc.), an organic nitrogen source (e.g. yeast extract, malt extract, peptone, etc.) and inorganic nutrient sources (e.g. phosphate, magnesium, potassium, zinc, iron, etc.).

[0231] The cultivation of the host cell may be performed over a period of from about 0.5 to about 30 days. The cultivation process may be a batch process, continuous or fed-batch process, suitably performed at a temperature in the range of 0-100° C. or 0-80° C., for example, from about 0° C. to about 50° C. and/or at a pH, for example, from about 2 to about 10. Preferred fermentation conditions for yeast and filamentous fungi are a temperature in the range of from about 25° C. to about 55° C. and at a pH of from about 3 to about 9. The appropriate conditions are usually selected based on the choice of host cell. Accordingly, in an embodiment the method of the invention further comprises one or more elements selected from:
[0232] a) culturing the cell culture in a nutrient growth medium;
[0233] b) culturing the cell culture under aerobic or anaerobic conditions
[0234] c) culturing the cell culture under agitation;
[0235] d) culturing the cell culture at a temperature of between 25 to 50° C.;
[0236] e) culturing the cell culture at a pH of between 3-9;
[0237] f) culturing the cell culture for between 10 hours to 30 days;
[0238] g) culturing the cell culture under fed-batch, repeated fed-batch, continuous, or semi-continuous conditions; and
[0239] h) culturing the cell culture in the presence of an organic solvent to improve the solubility of metabolites of the benzylisoquinoline alkaloid pathway.

[0240] The fermentation method of the invention, further suitably comprise feeding one or more exogenous oripavine acceptor and/or nororipavine acceptor or precursors thereof and/or glycoside donors to the cell culture.

[0241] It has been found that in vivo demethylation of thebaine into oripavine, thebaine into northebaine, northebaine into nororipavine, and/or oripavine into nororipavine the conversion rates of the demethylases or other pathway enzymes employed are positively affected by glycosylating the produced oripavine and/or nororipavine. Accordingly, in a special embodiment the fermentation method includes host cell which expresses one or more demethylases and/or other pathway enzymes involved in production or demethylating of thebaine into oripavine and/or nororipavine, and wherein the conversion rates (units mass⁻¹ time⁻¹) of the one or more demethylases and/or other pathway enzymes are increased compared to the conversion rates in a host cell not expressing the UGTs.

[0242] The cell culture and/or the the metabolites comprised therein may be recovered and or isolated using methods known in the art. For example, the cells and or metabolites may be recovered from the nutrient medium by conventional procedures including, but not limited to, centrifugation, filtration, spray-drying, or lyophilization. In a particular embodiment the method includes a recovery and/or isolation step comprising separating a liquid phase of the cell or cell culture from a solid phase of the cell or cell culture to obtain a supernatant comprising the oripavine glycoside and/or nororipavine glycoside and subjecting the supernatant to one or more steps selected from:
[0243] a) disrupting the host cell to release intracellular oripavine and/or nororipavine and/or oripavine glycoside and/or nororipavine glycoside into the supernatant;
[0244] b) separating the supernatant form the solid phase of the host cell, such as by filtration or gravity separation;
[0245] c) contacting the supernatant with one or more adsorbent resins in order to obtain at least a portion of the produced oripavine glycoside and/or nororipavine glycoside;
[0246] d) contacting the supernatant with one or more ion exchange or reversed-phase chromatography columns in order to obtain at least a portion of the oripavine glycoside and/or nororipavine glycoside;
[0247] e) extracting the oripavine, nororipavine, oripavine glycoside and/or nororipavine glycoside; and
[0248] f) precipitating the oripavine glycoside and/or nororipavine glycoside by crystallization or evaporating the solvent of the liquid phase; and optionally isolating the oripavine glycoside and/or nororipavine glycoside by filtration or gravity separation;
[0249] thereby recovering and/or isolating the oripavine glycoside and/or nororipavine glycoside.

### Fermentation Compositions

[0250] The invention further provides a fermentation composition comprising the cell culture of the invention and the oripavine glycosides and/or nororipavine glycosides comprised therein.

[0251] In one embodiment at least 10%, 25%, 50%, such as at least 75%, such as at least 95%, such as at least 99% of the cells of the fermentation composition of the invention are lysed. Further in the fermentation composition of the invention at least 10%, 25%, 50%, such as at least 75%, such as at least 95%, such as at least 99% of solid cellular material may have been removed and separated from a liquid phase. Moreover, in addition to oripavine glycosides and/or nororipavine glycosides the fermentation composition of the invention may also comprise precursors, products, metabolites of the benzylisoquionoline alkaloid pathway, in particular oripavine and/or nororipavine or comprise one or more compounds selected from trace metals, vitamins, salts, yeast nitrogen base, carbon source, YNB, and/or amino acids of the fermentation. In particular the fermentation composition comprises a concentration of oripavine glycosides and/or nororipavine glycosides of at least 1 mg/kg composition, such as at least 5 mg/kg, such as at least 10 mg/kg, such as at least 20 mg/kg, such as at least 50 mg/kg, such as at least 100 mg/kg, such as at least 500 mg/kg, such as at least 1000 mg/kg, such as at least 5000 mg/kg, such as at least 10000 mg/kg, such as at least 50000 mg/kg.

### Compositions

[0252] In a further aspect the invention further provides a composition comprising the fermentation composition of the invention and one or more carriers, agents, additives and/or excipients. Carriers, agents, additives and/or excipients includes formulation additives, stabilising agent, fillers and the like. The composition may be formulated into a dry solid form by using methods known in the art, such as spray drying, spray cooling, lyophilization, flash freezing, granulation, microgranulation, encapsulation or microencapsulation. The composition may also be formulated into liquid stabilized form using methods known in the art, such as formulation into a stabilized liquid comprising one or more stabilizers such as sugars and/or polyols (e.g. sugar alcohols) and/or organic acids (e.g. lactic acid).

### Sequences

[0253] The present application contains a Sequence Listing prepared in Patent In version 3.5.1, which is also submitted electronically in ST25 format which is hereby incorporated by reference in its entirety. For further reference, the following sequences are included with this application:

| SEQ ID NO: 1 | DNA | sequence | Glycosyl transferase | AHX74090 | From | Eucommia |
|---|---|---|---|---|---|---|
| | | of | | | | ulmoides |
| SEQ ID NO: 2 | DNA | sequence | Glycosyl transferase | AKA44592 | From | Panax ginseng |
| | | of | | | | |
| SEQ ID NO: 3 | DNA | sequence | Glycosyl transferase | AOC55048 | From | Carthamus |
| | | of | | | | tinctorius |
| SEQ ID NO: 4 | DNA | sequence | Glycosyl transferase | AUM57504 | From | Camellia |
| | | of | | | | fraterna |
| SEQ ID NO: 5 | DNA | sequence | Glycosyl transferase | BAI65911 | From | Forsythia x |
| | | of | | | | intermedia |
| SEQ ID NO: 6 | DNA | sequence | Glycosyl transferase | GEV22806 | From | Tanacetum |
| | | of | | | | cinerariifolium |
| SEQ ID NO: 7 | DNA | sequence | Glycosyl transferase | GEZ13352 | From | Tanacetum |
| | | of | | | | cinerariifolium |
| SEQ ID NO: 8 | DNA | sequence | Glycosyl transferase | KAA8526165 | From | Nyssa sinensis |
| | | of | | | | |
| SEQ ID NO: 9 | DNA | sequence | Glycosyl transferase | KAD3640082 | From | Mikania |
| | | of | | | | micrantha |
| SEQ ID NO: | DNA | sequence | Glycosyl transferase | KAD3640082_Scopt | From | Artificial |
| 10 | | of | | | | |
| SEQ ID NO: | DNA | sequence | Glycosyl transferase | KAD3640083 | From | Mikania |
| 11 | | of | | | | micrantha |
| SEQ ID NO: | DNA | sequence | Glycosyl transferase | KAD3640083_Scopt | From | Artificial |
| 12 | | of | | | | |
| SEQ ID NO: | DNA | sequence | Glycosyl transferase | KAD3640084 | From | Mikania |
| 13 | | of | | | | micrantha |
| SEQ ID NO: | DNA | sequence | Glycosyl transferase | KAD3640084_Scopt | From | Artificial |
| 14 | | of | | | | |
| SEQ ID NO: | DNA | sequence | Glycosyl transferase | KAD3640181 | From | Mikania |
| 15 | | of | | | | micrantha |
| SEQ ID NO: | DNA | sequence | Glycosyl transferase | KAD3640181_Scopt | From | Artificial |
| 16 | | of | | | | |
| SEQ ID NO: | DNA | sequence | Glycosyl transferase | PWA70520 | From | Artemisia |
| 17 | | of | | | | annua |
| SEQ ID NO: | DNA | sequence | Glycosyl transferase | PWA74166 | From | Artemisia |
| 18 | | of | | | | annua |
| SEQ ID NO: | DNA | sequence | Glycosyl transferase | PWA79737 | From | Artemisia |
| 19 | | of | | | | annua |
| SEQ ID NO: | DNA | sequence | Glycosyl transferase | PWA89810 | From | Artemisia |
| 20 | | of | | | | annua |
| SEQ ID NO: | DNA | sequence | Glycosyl transferase | SrUGT71E1 | From | Stevia |
| 21 | | of | | | | rebaudiana |
| SEQ ID NO: | DNA | sequence | Glycosyl transferase | SrUGT71E1_opt | From | Artificial |
| 22 | | of | | | | |
| SEQ ID NO: | DNA | sequence | Glycosyl transferase | XP_021998812 | From | Helianthus |
| 23 | | of | | | | annuus |
| SEQ ID NO: | DNA | sequence | Glycosyl transferase | XP_021998812_ | From | Artificial |
| 24 | | of | | Scopt | | |
| SEQ ID NO: | DNA | sequence | Glycosyl transferase | XP_023770763 | From | Lactuca sativa |
| 25 | | of | | | | |
| SEQ ID NO: | DNA | sequence | Glycosyl transferase | XP_023770764 | From | Lactuca sativa |
| 26 | | of | | | | |
| SEQ ID NO: | DNA | sequence | Glycosyl transferase | XP_023770764_ | From | Artificial |
| 27 | | of | | Scopt | | |
| SEQ ID NO: | DNA | sequence | Glycosyl transferase | XP_027172778 | From | Sesamum |
| 28 | | of | | | | indicum |
| SEQ ID NO: | DNA | sequence | Glycosyl transferase | XP_028099977 | From | Camellia |
| 29 | | of | | | | sinensis |
| SEQ ID NO: | DNA | sequence | Glycosyl transferase | XP_028101314 | From | Camellia |
| 30 | | of | | | | sinensis |
| SEQ ID NO: | DNA | sequence | Glycosyl transferase | KAB1219588 | From | Morella rubra |
| 31 | | of | | | | |
| SEQ ID NO: | DNA | sequence | Glycosyl transferase | KAF3968553 | From | Castanea |
| 32 | | of | | | | mollissima |
| SEQ ID NO: | DNA | sequence | Glycosyl transferase | KAF3968553_Scopt | From | Artificial |
| 33 | | of | | | | |
| SEQ ID NO: | DNA | sequence | Glycosyl transferase | KAF3968554 | From | Castanea |
| 34 | | of | | | | mollissima |
| SEQ ID NO: | DNA | sequence | Glycosyl transferase | KAF3968554_Scopt | From | Artificial |
| 35 | | of | | | | |
| SEQ ID NO: | DNA | sequence | Glycosyl transferase | Qs72S_1 | From | Quercus suber |
| 36 | | of | | | | |
| SEQ ID NO: | DNA | sequence | Glycosyl transferase | Qs72S_1_opt | From | Artificial |
| 37 | | of | | | | |
| SEQ ID NO: | DNA | sequence | Glycosyl transferase | XP_023875154 | From | Quercus suber |
| 38 | | of | | | | |
| SEQ ID NO: | DNA | sequence | Glycosyl transferase | XP_023875154_ | From | Artificial |
| 39 | | of | | Scopt | | |
| SEQ ID NO: | DNA | sequence | Glycosyl transferase | XP_023876189 | From | Quercus suber |
| 40 | | of | | | | |
| SEQ ID NO: | DNA | sequence | Glycosyl transferase | XP_023876282 | From | Quercus suber |
| 41 | | of | | | | |
| SEQ ID NO: | DNA | sequence | Glycosyl transferase | XP_023905565 | From | Quercus suber |
| 42 | | of | | | | |
| SEQ ID NO: | DNA | sequence | Glycosyl transferase | XP_023905565_ | From | Artificial |
| 43 | | of | | Scopt | | |
| SEQ ID NO: | DNA | sequence | Glycosyl transferase | XP_023914549 | From | Quercus suber |
| 44 | | of | | | | |
| SEQ ID NO: | DNA | sequence | Glycosyl transferase | XP_023914549_ | From | Artificial |
| 45 | | of | | Scopt | | |
| SEQ ID NO: | DNA | sequence | Glycosyl transferase | XP_023923919 | From | Quercus suber |
| 46 | | of | | | | |
| SEQ ID NO: | DNA | sequence | Glycosyl transferase | XP_030967178 | From | Quercus lobata |
| 47 | | of | | | | |
| SEQ ID NO: | DNA | sequence | Glycosyl transferase | XP_030967178_ | From | Artificial |
| 48 | | of | | Scopt | | |
| SEQ ID NO: | DNA | sequence | Glycosyl transferase | GEU38196 | From | Tanacetum |
| 49 | | of | | | | cinerariifolium |
| SEQ ID NO: | DNA | sequence | Glycosyl transferase | GEU38196_Scopt | From | Artificial |
| 50 | | of | | | | |
| SEQ ID NO: | DNA | sequence | Glycosyl transferase | KAD4384427 | From | Mikania |
| 51 | | of | | | | micrantha |
| SEQ ID NO: | DNA | sequence | Glycosyl transferase | KAD4384427_Scopt | From | Artificial |
| 52 | | of | | | | |
| SEQ ID NO: | DNA | sequence | Glycosyl transferase | PWA36889 | From | Artemisia |
| 53 | | of | | | | annua |
| SEQ ID NO: | DNA | sequence | Glycosyl transferase | PWA36889_Scopt | From | Artificial |
| 54 | | of | | | | |
| SEQ ID NO: | DNA | sequence | Glycosyl transferase | PWA37695 | From | Artemisia |
| 55 | | of | | | | annua |
| SEQ ID NO: | DNA | sequence | Glycosyl transferase | SrUGT73E1 | From | Stevia |
| 56 | | of | | | | rebaudiana |
| SEQ ID NO: | DNA | sequence | Glycosyl transferase | SrUGT73E1_opt | From | Artificial |
| 57 | | of | | | | |
| SEQ ID NO: | DNA | sequence | Glycosyl transferase | XP_023746016 | From | Lactuca sativa |
| 58 | | of | | | | |
| SEQ ID NO: | DNA | sequence | Glycosyl transferase | XP_023746016_ | From | Artificial |
| 59 | | of | | Scopt | | |
| SEQ ID NO: | DNA | sequence | Glycosyl transferase | XP_023764656 | From | Lactuca sativa |
| 60 | | of | | | | |
| SEQ ID NO: | Protein | sequence | Glycosyl transferase | AHX74090 | From | Eucommia |
| 61 | | of | | | | ulmoides |
| SEQ ID NO: | Protein | sequence | Glycosyl transferase | AKA44592 | From | Panax ginseng |
| 62 | | of | | | | |
| SEQ ID NO: | Protein | sequence | Glycosyl transferase | AOC55048 | From | Carthamus |
| 63 | | of | | | | tinctorius |
| SEQ ID NO: | Protein | sequence | Glycosyl transferase | AUM57504 | From | Camellia |
| 64 | | of | | | | fraterna |
| SEQ ID NO: | Protein | sequence | Glycosyl transferase | BAI65911 | From | Forsythia x |
| 65 | | of | | | | intermedia |
| SEQ ID NO: | Protein | sequence | Glycosyl transferase | GEV22806 | From | Tanacetum |
| 66 | | of | | | | cinerariifolium |
| SEQ ID NO: | Protein | sequence | Glycosyl transferase | GEZ13352 | From | Tanacetum |
| 67 | | of | | | | cinerariifolium |
| SEQ ID NO: | Protein | sequence | Glycosyl transferase | KAA8526165 | From | Nyssa sinensis |
| 68 | | of | | | | |
| SEQ ID NO: | Protein | sequence | Glycosyl transferase | KAD3640082 | From | Mikania |
| 69 | | of | | | | micrantha |
| SEQ ID NO: | protein | sequence | Glycosyl transferase | KAD3640082_Scopt | From | Mikania |
| 70 | | of | | | | micrantha |
| SEQ ID NO: | Protein | sequence | Glycosyl transferase | KAD3640083 | From | Mikania |
| 71 | | of | | | | micrantha |
| SEQ ID NO: | protein | sequence | Glycosyl transferase | KAD3640083_Scopt | From | Mikania |
| 72 | | of | | | | micrantha |
| SEQ ID NO: | Protein | sequence | Glycosyl transferase | KAD3640084 | From | Mikania |
| 73 | | of | | | | micrantha |
| SEQ ID NO: | protein | sequence | Glycosyl transferase | KAD3640084_Scopt | From | Mikania |
| 74 | | of | | | | micrantha |
| SEQ ID NO: | Protein | sequence | Glycosyl transferase | KAD3640181 | From | Mikania |
| 75 | | of | | | | micrantha |
| SEQ ID NO: | protein | sequence | Glycosyl transferase | KAD3640181_Scopt | From | Mikania |
| 76 | | of | | | | micrantha |
| SEQ ID NO: | Protein | sequence | Glycosyl transferase | PWA70520 | From | Artemisia |
| 77 | | of | | | | annua |
| SEQ ID NO: | Protein | sequence | Glycosyl transferase | PWA74166 | From | Artemisia |
| 78 | | of | | | | annua |
| SEQ ID NO: | Protein | sequence | Glycosyl transferase | PWA79737 | From | Artemisia |
| 79 | | of | | | | annua |
| SEQ ID NO: | Protein | sequence | Glycosyl transferase | PWA89810 | From | Artemisia |
| 80 | | of | | | | annua |
| SEQ ID NO: | Protein | sequence | Glycosyl transferase | SrUGT71E1 | From | Stevia |
| 81 | | of | | | | rebaudiana |
| SEQ ID NO: | protein | sequence | Glycosyl transferase | SrUGT71E1_opt | From | Stevia |
| 82 | | of | | | | rebaudiana |
| SEQ ID NO: | Protein | sequence | Glycosyl transferase | XP_021998812 | From | Helianthus |
| 83 | | of | | | | annuus |
| SEQ ID NO: | protein | sequence | Glycosyl transferase | XP_021998812_ | From | Helianthus |
| 84 | | of | | Scopt | | annuus |
| SEQ ID NO: | Protein | sequence | Glycosyl transferase | XP_023770763 | From | Lactuca sativa |
| 85 | | of | | | | |
| SEQ ID NO: | Protein | sequence | Glycosyl transferase | XP_023770764 | From | Lactuca sativa |
| 86 | | of | | | | |
| SEQ ID NO: | protein | sequence | Glycosyl transferase | XP_023770764_ | From | Lactuca sativa |
| 87 | | of | | Scopt | | |
| SEQ ID NO: | Protein | sequence | Glycosyl transferase | XP_027172778 | From | Sesamum |
| 88 | | of | | | | indicum |
| SEQ ID NO: | Protein | sequence | Glycosyl transferase | XP_028099977 | From | Camellia |
| 89 | | of | | | | sinensis |
| SEQ ID NO: | Protein | sequence | Glycosyl transferase | XP_028101314 | From | Camellia |
| 90 | | of | | | | sinensis |
| SEQ ID NO: | Protein | sequence | Glycosyl transferase | KAB1219588 | From | Morella rubra |
| 91 | | of | | | | |
| SEQ ID NO: | Protein | sequence | Glycosyl transferase | KAF3968553 | From | Castanea |
| 92 | | of | | | | mollissima |
| SEQ ID NO: | protein | sequence | Glycosyl transferase | KAF3968553_Scopt | From | Castanea |
| 93 | | of | | | | mollissima |
| SEQ ID NO: | Protein | sequence | Glycosyl transferase | KAF3968554 | From | Castanea |
| 94 | | of | | | | mollissima |
| SEQ ID NO: | protein | sequence | Glycosyl transferase | KAF3968554_Scopt | From | Castanea |
| 95 | | of | | | | mollissima |
| SEQ ID NO: | Protein | sequence | Glycosyl transferase | Qs72S_1 | From | Quercus suber |
| 96 | | of | | | | |
| SEQ ID NO: | protein | sequence | Glycosyl transferase | Qs72S_1_opt | From | Quercus suber |
| 97 | | of | | | | |
| SEQ ID NO: | Protein | sequence | Glycosyl transferase | XP_023875154 | From | Quercus suber |
| 98 | | of | | | | |
| SEQ ID NO: | protein | sequence | Glycosyl transferase | XP_023875154_ | From | Quercus suber |
| 99 | | of | | Scopt | | |
| SEQ ID NO: | Protein | sequence | Glycosyl transferase | XP_023876189 | From | Quercus suber |
| 100 | | of | | | | |
| SEQ ID NO: | Protein | sequence | Glycosyl transferase | XP_023876282 | From | Quercus suber |
| 101 | | of | | | | |
| SEQ ID NO: | Protein | sequence | Glycosyl transferase | XP_023905565 | From | Quercus suber |
| 102 | | of | | | | |
| SEQ ID NO: | protein | sequence | Glycosyl transferase | XP_023905565_ | From | Quercus suber |
| 103 | | of | | Scopt | | |
| SEQ ID NO: | Protein | sequence | Glycosyl transferase | XP_023914549 | From | Quercus suber |
| 104 | | of | | | | |
| SEQ ID NO: | protein | sequence | Glycosyl transferase | XP_023914549_ | From | Quercus suber |
| 105 | | of | | Scopt | | |
| SEQ ID NO: | Protein | sequence | Glycosyl transferase | XP_023923919 | From | Quercus suber |
| 106 | | of | | | | |
| SEQ ID NO: | Protein | sequence | Glycosyl transferase | XP_030967178 | From | Quercus lobata |
| 107 | | of | | | | |
| SEQ ID NO: | protein | sequence | Glycosyl transferase | XP_030967178_ | From | Quercus lobata |
| 108 | | of | | Scopt | | |
| SEQ ID NO: | Protein | sequence | Glycosyl transferase | GEU38196 | From | Tanacetum |
| 109 | | of | | | | cinerariifolium |
| SEQ ID NO: | protein | sequence | Glycosyl transferase | GEU38196_Scopt | From | Tanacetum |
| 110 | | of | | | | cinerariifolium |
| SEQ ID NO: | Protein | sequence | Glycosyl transferase | KAD4384427 | From | Mikania |
| 111 | | of | | | | micrantha |
| SEQ ID NO: | protein | sequence | Glycosyl transferase | KAD4384427_Scopt | From | Mikania |
| 112 | | of | | | | micrantha |
| SEQ ID NO: | Protein | sequence | Glycosyl transferase | PWA36889 | From | Artemisia |
| 113 | | of | | | | annua |
| SEQ ID NO: | protein | sequence | Glycosyl transferase | PWA36889_Scopt | From | Artemisia |
| 114 | | of | | | | annua |
| SEQ ID NO: | Protein | sequence | Glycosyl transferase | PWA37695 | From | Artemisia |
| 115 | | of | | | | annua |
| SEQ ID NO: | Protein | sequence | Glycosyl transferase | SrUGT73E1 | From | Stevia |
| 116 | | of | | | | rebaudiana |
| SEQ ID NO: | protein | sequence | Glycosyl transferase | SrUGT73E1_opt | From | Stevia |
| 117 | | of | | | | rebaudiana |
| SEQ ID NO: | Protein | sequence | Glycosyl transferase | XP_023746016 | From | Lactuca sativa |
| 118 | | of | | | | |
| SEQ ID NO: | protein | sequence | Glycosyl transferase | XP_023746016_ | From | Lactuca sativa |
| 119 | | of | | Scopt | | |
| SEQ ID NO: | Protein | sequence | Glycosyl transferase | XP_023764656 | From | Lactuca sativa |
| 120 | | of | | | | |
| SEQ ID NO: | protein | sequence | DAHP | Aro4fbr | From | Artificial |
| 121 | | of | | | | |
| SEQ ID NO: | DNA | sequence | DAHP | Aro4fbr | From | Artificial |
| 122 | | of | | | | |
| SEQ ID NO: | protein | sequence | chorismate mutase | ARO7fbr | From | Artificial |
| 123 | | of | | | | |
| SEQ ID NO: | DNA | sequence | chorismate mutase | ARO7fbr | From | Artificial |
| 124 | | of | | | | |
| SEQ ID NO: | protein | sequence | Tyr1 | Tyr1 | From | S. cerevisiae |
| 125 | | of | | | | |
| SEQ ID NO: | DNA | sequence | Tyr1 | Tyr1 | From | S. cerevisiae |
| 126 | | of | | | | |
| SEQ ID NO: | protein | sequence | TH | SoCYP76ADr9 | From | Spinacia |
| 127 | | of | | | | oleracea |
| SEQ ID NO: | DNA | sequence | TH | SoCYP76ADr9 | From | Spinacia |
| 128 | | of | | | | oleracea |
| SEQ ID NO: | protein | sequence | CPR′′′ | BvCPR1 | From | Beta vulgaris |
| 129 | | of | | | | |
| SEQ ID NO: | DNA | sequence | CPR′′′ | BvCPR1 | From | Beta vulgaris |
| 130 | | of | | | | |
| SEQ ID NO: | protein | sequence | DoDC | PpDoDC | From | Pseudomonas |
| 131 | | of | | | | putida |
| SEQ ID NO: | DNA | sequence | DoDC | PpDoDC | From | Pseudomonas |
| 132 | | of | | | | putida |
| SEQ ID NO: | protein | sequence | NCS | d19CjNCS | From | Coptis japonica |
| 133 | | of | | | | |
| SEQ ID NO: | DNA | sequence | NCS | d19CjNCS | From | Coptis japonica |
| 134 | | of | | | | |
| SEQ ID NO: | protein | sequence | 6-OMT | Ps6OMT_Q6WUC1 | From | Papaver |
| 135 | | of | | | | somniferum |
| SEQ ID NO: | DNA | sequence | 6-OMT | Ps6OMT_Q6WUC1 | From | Papaver |
| 136 | | of | | | | somniferum |
| SEQ ID NO: | protein | sequence | CNMT | CjCNMT | From | Coptis japonica |
| 137 | | of | | | | |
| SEQ ID NO: | DNA | sequence | CNMT | CjCNMT | From | Coptis japonica |
| 138 | | of | | | | |
| SEQ ID NO: | protein | sequence | NMCH | EcNMCH | From | Eschscholzia |
| 139 | | of | | | | californica |
| SEQ ID NO: | DNA | sequence | NMCH | EcNMCH | From | Eschscholzia |
| 140 | | of | | | | californica |
| SEQ ID NO: | protein | sequence | 4′-OMT | Cj4OMT | From | Coptis japonica |
| 141 | | of | | | | |
| SEQ ID NO: | DNA | sequence | 4′-OMT | Cj4OMT | From | Coptis japonica |
| 142 | | of | | | | |
| SEQ ID NO: | protein | sequence | DRS-DRR | DRS-DRR | From | Papaver |
| 143 | | of | | | | bracteatum |
| SEQ ID NO: | DNA | sequence | DRS-DRR | DRS-DRR | From | Papaver |
| 144 | | of | | | | bracteatum |
| SEQ ID NO: | protein | sequence | SAS | PbSAS | From | Papaver |
| 145 | | of | | | | bracteatum |
| SEQ ID NO: | DNA | sequence | SAS | PbSAS | From | Papaver |
| 146 | | of | | | | bracteatum |
| SEQ ID NO: | protein | sequence | SAT | PsSAT | From | Papaver |
| 147 | | of | | | | somniferum |
| SEQ ID NO: | DNA | sequence | SAT | PsSAT | From | Papaver |
| 148 | | of | | | | somniferum |
| SEQ ID NO: | protein | sequence | SAR | pbSalR | From | Papaver |
| 149 | | of | | | | bracteatum |
| SEQ ID NO: | DNA | sequence | SAR | pbSalR | From | Papaver |
| 150 | | of | | | | bracteatum |
| SEQ ID NO: | protein | sequence | THS | PsTHS1 | From | Papaver |
| 151 | | of | | | | somniferum |
| SEQ ID NO: | DNA | sequence | THS | PsTHS1 | From | Papaver |
| 152 | | of | | | | somniferum |
| SEQ ID NO: | protein | sequence | N-demethylase | Hv_CYP_ | From | Heliothis |
| 153 | | of | | A0A2A4JAM9 | | virescens |
| SEQ ID NO: | DNA | sequence | N-demethylase | Hv_CYP_ | From | Heliothis |
| 154 | | of | | A0A2A4JAM9 | | virescens |
| SEQ ID NO: | protein | sequence | (O- and N | HaCYP6AE15v2 | From | Helicoverpa |
| 155 | | of | demethylase | | | armigera |
| SEQ ID NO: | DNA | sequence | (O- and N | HaCYP6AE15v2 | From | Helicoverpa |
| 156 | | of | demethylase | | | armigera |
| SEQ ID NO: | protein | sequence | O- and N- | CYPDN_39 | From | Rhizopus |
| 157 | | of | demethylase | | | microsporus |
| SEQ ID NO: | DNA | sequence | O- and N- | CYPDN_39 | From | Rhizopus |
| 158 | | of | demethylase | | | microsporus |
| SEQ ID NO: | protein | sequence | CPR′ | HaCPR_E0A3A7 | From | Helicoverpa |
| 159 | | of | | | | armigera |
| SEQ ID NO: | DNA | sequence | CPR′ | HaCPR_E0A3A7 | From | Helicoverpa |
| 160 | | of | | | | armigera |
| SEQ ID NO: | protein | sequence | CPR′ | CeCPR | From | Cunninghamella |
| 161 | | of | | | | elegans |
| SEQ ID NO: | DNA | sequence | CPR′ | CeCPR | From | Cunninghamella |
| 162 | | of | | | | elegans |
| SEQ ID NO: | protein | sequence | Transporter MDR1 | T1_CjaMDR1_GA | From | Camellia |
| 163 | | of | | | | japonica |
| SEQ ID NO: | DNA | sequence | Transporter MDR1 | T1_CjaMDR1_GA | From | Camellia |
| 164 | | of | | | | japonica |
| SEQ ID NO: | protein | sequence | KO ARI1 | ARI1 | From | Saccharomyces |
| 165 | | of | | | | cerevisiae |
| SEQ ID NO: | DNA | sequence | KO ARI1 | ARI1 | From | Saccharomyces |
| 166 | | of | | | | cerevisiae |
| SEQ ID NO: | protein | sequence | KO GRE2 | GRE2 | From | Saccharomyces |
| 167 | | of | | | | cerevisiae |
| SEQ ID NO: | DNA | sequence | KO GRE2 | GRE2 | From | Saccharomyces |
| 168 | | of | | | | cerevisiae |
| SEQ ID NO: | DNA | sequence | Glycosyl transferase | | From | artificial |
| 169 | | of | | | | |
| SEQ ID NO: | Protein | sequence | Glycosyl transferase | | From | artificial |
| 170 | | of | | | | |
| SEQ ID NO: | DNA | sequence | Glycosyl transferase | | From | artificial |
| 171 | | of | | | | |
| SEQ ID NO: | Protein | sequence | Glycosyl transferase | | From | artificial |
| 172 | | of | | | | |
| SEQ ID NO: | DNA | sequence | Glycosyl transferase | | From | artificial |
| 173 | | of | | | | |
| SEQ ID NO: | Protein | sequence | Glycosyl transferase | | From | artificial |
| 174 | | of | | | | |
| SEQ ID NO: | DNA | sequence | Glycosyl transferase | | From | artificial |
| 175 | | of | | | | |
| SEQ ID NO: | Protein | sequence | Glycosyl transferase | | From | artificial |
| 176 | | of | | | | |
| SEQ ID NO: | DNA | sequence | Glycosyl transferase | | From | artificial |
| 177 | | of | | | | |
| SEQ ID NO: | Protein | sequence | Glycosyl transferase | | From | artificial |
| 178 | | of | | | | |
| SEQ ID NO: | DNA | sequence | Glycosyl transferase | | From | artificial |
| 179 | | of | | | | |
| SEQ ID NO: | Protein | sequence | Glycosyl transferase | | From | artificial |
| 180 | | of | | | | |
| SEQ ID NO: | DNA | sequence | Glycosyl transferase | | From | artificial |
| 181 | | of | | | | |
| SEQ ID NO: | Protein | sequence | Glycosyl transferase | | From | artificial |
| 182 | | of | | | | |
| SEQ ID NO: | DNA | sequence | Glycosyl transferase | | From | artificial |
| 183 | | of | | | | |
| SEQ ID NO: | Protein | sequence | Glycosyl transferase | | From | artificial |
| 184 | | of | | | | |
| SEQ ID NO: | DNA | sequence | Glycosyl transferase | | From | artificial |
| 185 | | of | | | | |
| SEQ ID NO: | Protein | sequence | Glycosyl transferase | | From | artificial |
| 186 | | of | | | | |
| SEQ ID NO: | DNA | sequence | Glycosyl transferase | | From | artificial |
| 187 | | of | | | | |
| SEQ ID NO: | Protein | sequence | Glycosyl transferase | | From | artificial |
| 188 | | of | | | | |
| SEQ ID NO: | DNA | sequence | Glycosyl transferase | | From | artificial |
| 189 | | of | | | | |
| SEQ ID NO: | Protein | sequence | Glycosyl transferase | | From | artificial |
| 190 | | of | | | | |
| SEQ ID NO: | DNA | sequence | Glycosyl transferase | | From | artificial |
| 191 | | of | | | | |
| SEQ ID NO: | Protein | sequence | Glycosyl transferase | | From | artificial |
| 192 | | of | | | | |
| SEQ ID NO: | DNA | sequence | Glycosyl transferase | | From | artificial |
| 193 | | of | | | | |
| SEQ ID NO: | Protein | sequence | Glycosyl transferase | | From | artificial |
| 194 | | of | | | | |
| SEQ ID NO: | DNA | sequence | Glycosyl transferase | | From | artificial |
| 195 | | of | | | | |
| SEQ ID NO: | Protein | sequence | Glycosyl transferase | | From | artificial |
| 196 | | of | | | | |
| SEQ ID NO: | DNA | sequence | Glycosyl transferase | | From | artificial |
| 197 | | of | | | | |
| SEQ ID NO: | Protein | sequence | Glycosyl transferase | | From | artificial |
| 198 | | of | | | | |
| SEQ ID NO: | DNA | sequence | Glycosyl transferase | | From | artificial |
| 199 | | of | | | | |
| SEQ ID NO: | Protein | sequence | Glycosyl transferase | | From | artificial |
| 200 | | of | | | | |
| SEQ ID NO: | DNA | sequence | Glycosyl transferase | | From | artificial |
| 201 | | of | | | | |
| SEQ ID NO: | Protein | sequence | Glycosyl transferase | | From | artificial |
| 202 | | of | | | | |
| SEQ ID NO: | DNA | sequence | Glycosyl transferase | | From | artificial |
| 203 | | of | | | | |
| SEQ ID NO: | Protein | sequence | Glycosyl transferase | | From | artificial |
| 204 | | of | | | | |
| SEQ ID NO: | DNA | sequence | Glycosyl transferase | | From | artificial |
| 205 | | of | | | | |
| SEQ ID NO: | Protein | sequence | Glycosyl transferase | | From | artificial |
| 206 | | of | | | | |
| SEQ ID NO: | DNA | sequence | Glycosyl transferase | | From | artificial |
| 207 | | of | | | | |
| SEQ ID NO: | Protein | sequence | Glycosyl transferase | | From | artificial |
| 208 | | of | | | | |
| SEQ ID NO: | DNA | sequence | Glycosyl transferase | | From | artificial |
| 209 | | of | | | | |
| SEQ ID NO: | Protein | sequence | Glycosyl transferase | | From | artificial |
| 210 | | of | | | | |
| SEQ ID NO: | DNA | sequence | Glycosyl transferase | | From | artificial |
| 211 | | of | | | | |
| SEQ ID NO: | Protein | sequence | Glycosyl transferase | | From | artificial |
| 212 | | of | | | | |
| SEQ ID NO: | DNA | sequence | Glycosyl transferase | | From | artificial |
| 213 | | of | | | | |
| SEQ ID NO: | Protein | sequence | Glycosyl transferase | | From | artificial |
| 214 | | of | | | | |
| SEQ ID NO: | DNA | sequence | Glycosyl transferase | | From | artificial |
| 215 | | of | | | | |
| SEQ ID NO: | Protein | sequence | Glycosyl transferase | | From | artificial |
| 216 | | of | | | | |
| SEQ ID NO: | DNA | sequence | Glycosyl transferase | | From | artificial |
| 217 | | of | | | | |
| SEQ ID NO: | Protein | sequence | Glycosyl transferase | | From | artificial |
| 218 | | of | | | | |
| SEQ ID NO: | DNA | sequence | Glycosyl transferase | | From | artificial |
| 219 | | of | | | | |
| SEQ ID NO: | Protein | sequence | Glycosyl transferase | | From | artificial |
| 220 | | of | | | | |
| SEQ ID NO: | DNA | sequence | Glycosyl transferase | | From | artificial |
| 221 | | of | | | | |
| SEQ ID NO: | Protein | sequence | Glycosyl transferase | | From | artificial |
| 222 | | of | | | | |
| SEQ ID NO: | DNA | sequence | uptake transporter | | From | artificial |
| 223 | | of | | | | |
| SEQ ID NO: | Protein | sequence | uptake transporter | | From | artificial |
| 224 | | of | | | | |
| SEQ ID NO: | DNA | sequence | uptake transporter | | From | artificial |
| 225 | | of | | | | |
| SEQ ID NO: | Protein | sequence | uptake transporter | | From | artificial |
| 226 | | of | | | | |
| SEQ ID NO: | DNA | sequence | uptake transporter | | From | artificial |
| 227 | | of | | | | |
| SEQ ID NO: | Protein | sequence | uptake transporter | | From | artificial |
| 228 | | of | | | | |
| SEQ ID NO: | DNA | sequence | uptake transporter | | From | artificial |
| 229 | | of | | | | |
| SEQ ID NO: | Protein | sequence | uptake transporter | | From | artificial |
| 230 | | of | | | | |
| SEQ ID NO: | DNA | sequence | uptake transporter | | From | artificial |
| 231 | | of | | | | |
| SEQ ID NO: | Protein | sequence | uptake transporter | | From | artificial |
| 232 | | of | | | | |
| SEQ ID NO: | DNA | sequence | uptake transporter | | From | artificial |
| 233 | | of | | | | |
| SEQ ID NO: | Protein | sequence | uptake transporter | | From | artificial |
| 234 | | of | | | | |
| SEQ ID NO: | DNA | sequence | uptake transporter | | From | artificial |
| 235 | | of | | | | |
| SEQ ID NO: | Protein | sequence | uptake transporter | | From | artificial |
| 236 | | of | | | | |
| SEQ ID NO: | DNA | sequence | uptake transporter | | From | artificial |
| 237 | | of | | | | |
| SEQ ID NO: | Protein | sequence | uptake transporter | | From | artificial |
| 238 | | of | | | | |
| SEQ ID NO: | DNA | sequence | uptake transporter | | From | artificial |
| 239 | | of | | | | |
| SEQ ID NO: | Protein | sequence | uptake transporter | | From | artificial |
| 240 | | of | | | | |
| SEQ ID NO: | DNA | sequence | uptake transporter | | From | artificial |
| 241 | | of | | | | |
| SEQ ID NO: | Protein | sequence | uptake transporter | | From | artificial |
| 242 | | of | | | | |
| SEQ ID NO: | DNA | sequence | uptake transporter | | From | artificial |
| 243 | | of | | | | |
| SEQ ID NO: | Protein | sequence | uptake transporter | | From | artificial |
| 244 | | of | | | | |
| SEQ ID NO: | DNA | sequence | uptake transporter | | From | artificial |
| 245 | | of | | | | |
| SEQ ID NO: | Protein | sequence | uptake transporter | | From | artificial |
| 246 | | of | | | | |
| SEQ ID NO: | DNA | sequence | uptake transporter | | From | artificial |
| 247 | | of | | | | |
| SEQ ID NO: | Protein | sequence | uptake transporter | | From | artificial |
| 248 | | of | | | | |
| SEQ ID NO: | DNA | sequence | uptake transporter | | From | artificial |
| 249 | | of | | | | |
| SEQ ID NO: | Protein | sequence | uptake transporter | | From | artificial |
| 250 | | of | | | | |
| SEQ ID NO: | DNA | sequence | uptake transporter | | From | artificial |
| 251 | | of | | | | |
| SEQ ID NO: | Protein | sequence | uptake transporter | | From | artificial |
| 252 | | of | | | | |
| SEQ ID NO: | DNA | sequence | uptake transporter | | From | artificial |
| 253 | | of | | | | |
| SEQ ID NO: | Protein | sequence | uptake transporter | | From | artificial |
| 254 | | of | | | | |
| SEQ ID NO: | DNA | sequence | N-demethylase | | From | artificial |
| 255 | | of | | | | |
| SEQ ID NO: | Protein | sequence | N-demethylase | | From | artificial |
| 256 | | of | | | | |
| SEQ ID NO: | DNA | sequence | N-demethylase | | From | artificial |
| 257 | | of | | | | |
| SEQ ID NO: | Protein | sequence | N-demethylase | | From | artificial |
| 258 | | of | | | | |
| SEQ ID NO: | DNA | sequence | CPR | | From | artificial |
| 259 | | of | | | | |
| SEQ ID NO: | Protein | sequence | CPR | | From | artificial |
| 260 | | of | | | | |

### EXAMPLES

### Materials and Methods

### Materials

[0254] Chemicals used in the examples herein e.g. for buffers and substrates are commercial products of at least reagent grade.

### LB Medium

[0255] The LB medium as used through the examples is commonly known in the art.

### LB Medium+Ampicillin

[0256] The LB medium+ampicillin as used through the examples is commonly known in the art.

### Expression Medium

[0257] An expression medium was prepared according to Table 1:

TABLE 1

| | | |
|---|---|---|
| Expression medium | Amount | Final conc |

| | | | | |
|---|---|---|---|---|
| LB liquid media | 100 | mL | 100 | μg/mL |
| Ampicillin (100 μg/μL stock) | 100 | μL | 0.15 | mM |
| Sterile-filtrated IPTG (1M stock) | 15 | μL | 4.5 | mM |

### Resuspension Medium

[0258] A resuspension medium was prepared according to Table 2:

TABLE 2

| Resuspension medium | Amount | | Final conc | |
|---|---|---|---|---|
| Tris-HCl, pH 7.4 (1M stock) | 2.5 | mL | 50 | mM |
| MQ H2O | 47.5 | mL | | |
| PMSF (1M stock in DMSO) | 50 | μL | 0.15 | mM |
| EDTA-free Complete mini, | 2 | tablets | | |
| protease inhibitor tablet (Roche)* | | | | |

### Lysis Solution

[0259] A solution for lysing cells was prepared according to Table 3:

TABLE 3

| Lysing Solution | Amount | | Final conc | |
|---|---|---|---|---|
| Denarase (250 U/μL stock) DNase, | 0.6 | μL | 300 | U/mL |
| C-LECta. Art no. 20804-100k) | | | | |
| MgCl₂ (1M stock) | 1.3 | μL | 2.6 | mM |
| CaCl₂ (1M stock) | 0.5 | μL | 1 | mM |
| Lysozyme(10 mg/mL stock). (Sigma L6876) | 10 | μL | 0.05 | mg/mL |
| Total | 12.4 | μL | | |

### Elution Buffer

[0260] An elution buffer for protein purification was prepared according to Table 4:

TABLE 4

| | | |
|---|---|---|
| Elution buffer | 0.250 | L |
| Tris-HCl pH 7.4 (1M stock) | 5 | mL |
| Imidazole (1M stock) | 125 | mL |
| MilliQ water | 120 | mL |

### SC-his-Leu-Ura Medium

[0261] The SC-His-Leu-Ura medium as used through the examples is commonly known in the art.

DELFT Minimal Medium with Oripavine

[0262] The DELFT minimal medium as used through the examples is commonly known in the art.

### Seed-Train Medium

[0263] A seed train medium was prepared as an aqueous solution of 10.0 g/L succinic acid, 6.0 g/L NaOH, 5.0 g/L (NH₄)₂SO₄, 3.0 g/L KH₂PO₄, 0.5 g/L MgSO₄0.7H₂O, 22 g/L (2%) glucose monohydrate. The aqueous solution was further added 10.0 mL/L of trace metal stock solution (adapted from Hoek et al., 2000) and 12 ml/L of (Delft) vitamin stock solution (Hoek et al., 2000) and the pH of the medium was adjusted to 6.5 prior to sterilization. The medium was sterilized at 121° C. for 20 min before use.

### Batch Medium

[0264] A batch medium was prepared as an aqueous solution of 5.0 g/L (NH₄)₂SO₄, 3.0 g/L KH₂PO₄, 0.5 g/L MgSO₄·7H₂O, 1.0 g/L SB2020 (antifoam), 13.0 g/L (1%) glucose monohydrate. The aqueous solution was further added 10 mL/L of trace metal stock solution (adapted from Hoek et al., 2000) and 12 ml/L of (Delft) vitamin stock solution (Hoek et al., 2000). The medium was sterilized at 121° C. for 20 min before use.

### Fed-Batch Medium

[0265] A fed-batch medium was prepared as an aqueous solution of 5.0 g/L (NH₄)₂SO₄, 11.2 g/L KH₂PO₄, 6.3 g/L MgSO₄·7H₂O, 4.3 g/L K₂SO₄, 0.347 Na₂SO₄, 1.0 SB2020 (antifoam), 682 (62%) glucose monohydrate. The aqueous solution was further added 14.4 mL/L of trace metal stock solution (adapted from Hoek et al., 2000) and 14.8 ml/L of (Delft) vitamin stock solution (Hoek et al., 2000). The medium was sterilized at 121° C. for 20 min before use.

### Strains

[0266] A commercially available E. coli background BL21 (DE3) strain commonly known in the art was used.

[0267] Saccharomyces cerevisiae yeast strain sOD157 (MATa his3Δ0 leu2Δ0 ura3Δ0 CATS-91Met GAL2 ho MIP1-661Thr SAL1-1) was used as background strain. Strain sOD157 with the said genotype corresponds to strain S288C (genotype MATa his300 leu200 ura300) which is a publicly available widely used laboratory strain (see the Saccharomyces Genome Database (SGD)). Accordingly, similar results can be reached by using strain S288C as the results demonstrated below using strain sOD157 as the base strain for modification, background and/or control. All strain transformations with relevant plasmids were done using the lithium acetate method (Gietz et al. 2007).

### Genes and Enzymes

[0268] Glycosyltransferases (UGTs) from Stevia rebaudiana (subfamily 71 UGT71E1 and subfamily 73 UGT73E1) and from Quercus suber (subfamily 72 Qs72S_1 (XP_023905554)) and sequence homologs thereof according to Table 5 were prepared as ORFS codon optimized for E. coli cloned in the SpeI-XhoI site of vector pRSGLY. pRSGLY is a typical E. coli expression vector comprising ampicillin (AmpR) selection marker, LacO operator sequence for repressor binding, His tag (6×His N-terminal), Rop protein gene, Origin of replication (pBR322/pMB1 ori) and T7 promoter/terminator for directing IPTG inducible expression of the target gene and maintained at medium copy number. Insertion of genes into this vector made expression in E. coli and subsequent purification possible.

TABLE 5

| Subfamily 71 UGT | | Subfamily 72 UGT | | Subfamily 73 UGT | |
|---|---|---|---|---|---|
| Gene | Sequence | Gene | Sequence | Gene | Sequence |
| AHX74090 | SEQ ID NO: 1 | UGT72-0 | — | GEU38196 | SEQ ID NO: 49 |
| AKA44592 | SEQ ID NO: 2 | KAB1219588 | SEQ ID NO: 31 | GEU38196_Scopt | SEQ ID NO: 50 |
| AOC55048 | SEQ ID NO: 3 | UGT72-1 | — | UGT73-1 | — |
| AUM57504 | SEQ ID NO: 4 | UGT72-2 | — | UGT73-2 | — |
| BAI65911 | SEQ ID NO: 5 | KAF3968553 | SEQ ID NO: 32 | KAD4384427 | SEQ ID NO: 51 |
| 71UGT-1 | — | KAF3968553_Scopt | SEQ ID NO: 33 | KAD4384427_Scopt | SEQ ID NO: 52 |
| GEV22806 | SEQ ID NO: 6 | KAF3968554 | SEQ ID NO: 34 | UGT73-3 | — |
| GEZ13352 | SEQ ID NO: 7 | KAF3968554_Scopt | SEQ ID NO: 35 | UGT73-4 | — |
| KAA8526165 | SEQ ID NO: 8 | UGT72-3 | — | PWA36889 | SEQ ID NO: 53 |
| 71UGT-2 | — | UGT72-4 | — | PWA36889_Scopt | SEQ ID NO: 54 |
| 71UGT-3 | — | UGT72-5 | — | UGT73-5 | |
| 71UGT-4 | — | UGT72-6 | — | PWA37695 | SEQ ID NO: 55 |
| KAD3640082 | SEQ ID NO: 9 | Qs72S_1 | SEQ ID NO: 36 | UGT73-6 | — |
| KAD3640082_Scopt | SEQ ID NO: 10 | Qs72S_1_opt | SEQ ID NO: 37 | UGT73-7 | — |
| KAD3640083 | SEQ ID NO: 11 | UGT72-7 | — | UGT73-8 | — |
| KAD3640083_Scopt | SEQ ID NO: 12 | UGT72-8 | — | SrUGT73E1 | SEQ ID NO: 56 |
| KAD3640084 | SEQ ID NO: 13 | UGT72-9 | — | SrUGT73E1_opt | SEQ ID NO: 57 |
| KAD3640084_Scopt | SEQ ID NO: 14 | UGT72-10 | — | XP_023746016 | SEQ ID NO: 58 |
| KAD3640181 | SEQ ID NO: 15 | XP_023875154 | SEQ ID NO: 38 | XP_023746016_Scopt | SEQ ID NO: 59 |
| KAD3640181_Scopt | SEQ ID NO: 16 | XP_023875154_Scopt | SEQ ID NO: 39 | UGT73-9 | — |
| PWA70520 | SEQ ID NO: 17 | UGT72-11 | — | UGT73-10 | — |
| PWA74166 | SEQ ID NO: 18 | XP_023876189 | SEQ ID NO: 40 | UGT73-11 | — |
| PWA79737 | SEQ ID NO: 19 | XP_023876282 | SEQ ID NO: 41 | UGT73-12 | — |
| PWA89810 | SEQ ID NO: 20 | UGT72-12 | — | XP_023764656 | SEQ ID NO: 60 |
| SrUGT71E1 | SEQ ID NO: 21 | XP_023905565 | SEQ ID NO: 42 | UGT73-14 | — |
| SrUGT71E1_opt | SEQ ID NO: 22 | XP_023905565_Scopt | SEQ ID NO: 43 | UGT73-15 | — |
| 71UGT-5 | — | XP_023914549 | SEQ ID NO: 44 | UGT73-16 | — |
| XP_021998812 | SEQ ID NO: 23 | XP_023914549_Scopt | SEQ ID NO: 45 | UGT73-17 | — |
| XP_021998812_Scopt | SEQ ID NO: 24 | XP_023923919 | SEQ ID NO: 46 | UGT73-18 | — |
| 71UGT-6 | — | UGT72-13 | — | UGT73-19 | — |
| XP_023770763 | SEQ ID NO: 25 | UGT72-14 | — | UGT73-20 | — |
| XP_023770764 | SEQ ID NO: 26 | UGT72-15 | — | | |
| XP_023770764_Scopt | SEQ ID NO: 27 | UGT72-16 | — | | |
| 71UGT-7 | — | XP_030967178 | SEQ ID NO: 47 | | |
| XP_027172778 | SEQ ID NO: 28 | XP_030967178_Scopt | SEQ ID NO: 48 | | |
| XP_028099977 | SEQ ID NO: 29 | UGT72-17 | — | | |
| XP_028101314 | SEQ ID NO: 30 | | | | |

Table 5 lists the UGTs expressed in E. coli. These were subsequently purified and tested for their ability to glucosylate Oripavine and/or Nororipavine.

### HPLC Analysis for Example 1 to 6

[0269] Stock solutions of oripavine and nororipavine were prepared in DMSO at a concentration of 10 mM. Standard solutions were prepared at concentrations of 50 μM, 100 μM, 250 μM and 500 μM from the stock solutions.

[0270] 1 μL samples of standard solution or UGT test sample were injected into an Agilent 1290 Infinity I UHPLC with a binary pump (Agilent Technologies, Palo Alto, CA, USA) at a mobile phase flow rate at 600 μL/min. Separation was achieved on a Kinetex F5 column (100×2.1 mm, 1.7 μm, 100 Å, Phenomenex, Torrance, CA, USA) using 0.05% (v/v) formic acid in H₂O and 0.05% (v/v) formic acid in acetonitrile as mobile phases A and B, respectively using the time-gradient as shown in Table 6

TABLE 6

| Time (min) | % B |
|---|---|
| 0.0-3.6 | 2-30 |
| 3.6-4.1 | 30-100 |
| 4.1-5.1 | 100 |
| 5.1-5.5 | 100-2 |
| 5.5-6.5 | 2 |

[0271] The column temperature was maintained at 30° C. The liquid chromatography system was coupled to an Agilent 1290 diode array detector (Agilent Technologies, Palo Alto, CA, USA). UV-spectra were acquired at 220, 254 and 285 nm with 285 nm used for quantification of nororipavine and oripavine.

### LC/MS Analysis

[0272] Samples containing O-glycosyl Nororipavine and O-glycosyl Oripavine were injected into an Agilent 1290 Infinity II UHPLC with a binary pump coupled to an Ultivo QqQ mass spectrometer (Agilent Technologies, Palo Alto, CA, USA). Separation was achieved on a Kinetex F5 column (100×2.1 mm, 1.7 μm, 100 Å, Phenomenex, Torrance, CA, USA) using 0.1% (v/v) formic acid in H₂O and 0.1% (v/v) formic acid in acetonitrile as mobile phases A and B, respectively. The gradient was as shown in Table 7. Specific conditions for UHPLC and MS can be found in Table 8 and Table 9. O-glycosyl Nororipavine and O-glycosyl Oripavine were detected in multiple reaction monitoring (mode) specified in Table 10.

TABLE 7

| Time (min) | % B |
|---|---|
| 0 | 2 |
| 0.30 | 2 |
| 4.00 | 30 |
| 4.40 | 100 |
| 4.90 | 100 |
| 5 | 2 |
| 6 | 2 |

TABLE 8

| Parameter | Value |
|---|---|
| Injection volume | 2 μl |
| Column Temperature | 30° C. ± 4° C. |
| Injection method | Flow through needle |
| Flow | 0.4 ml/min |
| Auto sampler temperature | 4° C. ± 2° C. |
| Reconditioning wash | 2% Acetonitrile (in H₂O), 5 sec |
| Weak wash | 20% Methanol (in H₂O), 5 sec |
| Strong wash | 30% Acetonitrile, 30% Methanol, |
| | 30% 2-Propanol, 10% H₂O, 10 sec |
| Seal wash | 20% 2-Propanol (in H₂O) |

TABLE 9

| Source Parameter | Value | |
|---|---|---|
| Ion Source | Electrospray | |
| | Positive Mode (ESI+) | |
| Capillary Voltage | 3.5 | kV |
| Nozzle Voltage | 500 | V |
| Source Gas Temperature | 340° C. | |
| Source Gas Flow | 12 | L/min |
| Source Sheath Gas Temperature | 380° C. | |
| Source Sheath Gas Flow | 12 | L/min |
| Nebulizer | 30 | psi |

| | |
|---|---|
| Mode | MS/MS |

TABLE 10

| | Retention | Precursor | Product | Fragmentor | Collision |
|---|---|---|---|---|---|
| Target | time | ion | ion | voltage | energy |
| compound | (min) | (m/z) | (m/z) | (V) | (V) |
| O—glycosyl | 2 | 446 | 284 | 120 | 10 |
| nororipavine | | | 267 | 120 | 10 |
| O—glycosyl | 2.1 | 460 | 298 | 110 | 0 |
| oripavine | | | 58.1 | 110 | 5 |

### HPLC Analysis for Example 7 to 9

[0273] Stock solutions of oripavine and nororipavine were prepared in DMSO at a concentration of 10 mM. Standard solutions were prepared at concentrations of 50 μM, 100 μM, 250 μM and 500 μM from the stock solutions. Samples were injected into an Agilent 1290 Infinity I UHPLC with a binary pump (Agilent Technologies, Palo Alto, CA, USA). Separation was achieved on a Kinetex F5 column (100×2.1 mm, 1.7 μm, 100 Å, Phenomenex, Torrance, CA, USA) using 0.05% (v/v) formic acid in H₂O and 0.05% (v/v) formic acid in acetonitrile as mobile phases A and B, respectively using the time-gradient as shown in Table 11

TABLE 11

| Time (min) | % B |
|---|---|
| 0.0-3.6 | 2-30 |
| 3.6-4.1 | 30-100 |
| 4.1-5.1 | 100 |
| 5.1-5.5 | 100-2 |
| 5.5-6.5 | 2 |

[0274] The injection volume was 1 μL and the mobile phase flow rate was 600 μL/min. The column temperature was maintained at 30° C. The liquid chromatography system was coupled to an Agilent 1290 diode array detector (Agilent Technologies, Palo Alto, CA, USA). UV-spectra were acquired at 220, 254 and 285 nm with 285 nm used for quantification of nororipavine and oripavine.

[0275] In subsequent assays a modified HPLC method was utilized. Stock solutions were prepared in DMSO at a concentration of 25 mM. Standard solutions were prepared at concentrations of 50 μM, 125 μM, 250 μM and 500 μM from the stock solutions. Samples were injected into an Agilent 1290 Infinity I UHPLC with a binary pump (Agilent Technologies, Palo Alto, CA, USA). Separation was achieved on a Kinetex F5 column (100×2.1 mm, 1.7 μm, 100 Å, Phenomenex, Torrance, CA, USA) using 0.05% (v/v) formic acid in H₂O and 0.05% (v/v) formic acid in acetonitrile as mobile phases A and B, respectively using the time-gradient as shown in Table 12

TABLE 12

| Time (min) | % B |
|---|---|
| 0.0-1.0 | 2 |
| 1.0-4.8 | 2-30 |
| 4.8-5.0 | 30-100 |
| 5.0-6.0 | 100 |
| 6.0-6.2 | 100-2 |
| 6.2-6.5 | 2 |

[0276] O-glycosyl nororipavine, 0-glycosyl oripavine, nororipavine and oripavine eluted at 2.13, 2.40, 2.73 and 2.97 min, respectively.

[0277] The injection volume was 1 μL and the flow rate was 600 μL/min. The column temperature was maintained at 30° C. The liquid chromatography system was coupled to an Agilent 1290 diode array detector (Agilent Technologies, Palo Alto, CA, USA). UV-spectra were acquired at 220, 254 and 285 nm. 285 nm used for the quantification of nororipavine, oripavine and 0-glycosyl-compounds.

### LC/MS Analysis

[0278] Samples containing O-glycosyl Nororipavine and O-glycosyl Oripavine were injected into an Agilent 1290 Infinity II UHPLC with a binary pump coupled to an Ultivo QqQ mass spectrometer (Agilent Technologies, Palo Alto, CA, USA). Separation was achieved on a Kinetex F5 column (100×2.1 mm, 1.7 μm, 100 Å, Phenomenex, Torrance, CA, USA) using 0.1% (v/v) formic acid in H₂O and 0.1% (v/v) formic acid in acetonitrile as mobile phases A and B, respectively. The gradient was as shown in Table 7. Specific conditions for UHPLC and MS can be found in Table 8 and Table 9. O-glycosyl Nororipavine and O-glycosyl Oripavine were detected in multiple reaction monitoring (mode) specified in Table 10.

TABLE 13

| Time (min) | % B |
|---|---|
| 0 | 2 |
| 0.30 | 2 |
| 4.00 | 30 |
| 4.40 | 100 |
| 4.90 | 100 |
| 5 | 2 |
| 6 | 2 |

TABLE 14

| Parameter | Value |
|---|---|
| Injection volume | 2 μl |
| Column Temperature | 30° C. ± 4° C. |
| Injection method | Flow through needle |
| Flow | 0.4 ml/min |
| Auto sampler temperature | 4° C. ± 2° C. |
| Reconditioning wash | 2% Acetonitrile (in H₂O), 5 sec |
| Weak wash | 20% Methanol (in H₂O), 5 sec |
| Strong wash | 30% Acetonitrile, 30% Methanol, |
| | 30% 2-Propanol, 10% H₂O, 10 sec |
| Seal wash | 20% 2-Propanol (in H₂O) |

TABLE 15

| Source Parameter | Value | |
|---|---|---|
| Ion Source | Electrospray | |
| | Positive Mode (ESI+) | |
| Capillary Voltage | 3.5 | kV |
| Nozzle Voltage | 500 | V |
| Source Gas Temperature | 340° C. | |
| Source Gas Flow | 12 | L/min |
| Source Sheath Gas | 380° C. | |
| Temperature | | |
| Source Sheath Gas Flow | 12 | L/min |
| Nebulizer | 30 | psi |

| | |
|---|---|
| Mode | MS/MS |

TABLE 16

| | Retention | Precursor | Product | Fragmentor | Collision |
|---|---|---|---|---|---|
| Target | time | ion | ion | voltage | energy |
| compound | (min) | (m/z) | (m/z) | (V) | (V) |
| O—glycosyl | 2 | 446 | 284 | 120 | 10 |
| Nororipavine | | | 267 | 120 | 10 |
| O—glycosyl | 2.1 | 460 | 298 | 110 | 0 |
| Oripavine | | | 58.1 | 110 | 5 |

### Example 1—Expression of UGTs in E. coli, and In Vitro Tests of Glucosylation of Oripavine and Nororipavine

[0279] Preparation of Transformed E. coli Hosts

[0280] E. coli hosts expressing UGTs comprised in Table 5 was prepared by introducing the appropriate genes in the background E. coli strain using methods commonly known in the art.

### Day 1—Preparation of Overnight Cultures

[0281] 96-deep-well replica plates with LB medium+Ampicillin (1 ml/well) were set up and inoculated with E. coli hosts expressing each of the UGTs. The inoculates were grown overnight at 37° C., shaking vigorously at 250 rpm.

### Day 2—Preparation of Expression Cultures

[0282] 670 μL expression medium was dispensed in each well of fresh 96-deep-well plates followed by addition of 3304 overnight culture. The expression cultures were incubated in the wells overnight at 20° C. and shaking at 180-250 rpm.

### Day 3— Harvesting and Resuspension:

[0283] Cell of the expression cultures were harvested by centrifugation (max speed, 5 minutes, room temperature) and discarding the supernatant. The cells were resuspended each cell pellet in 1254 cold resuspension medium 50 mM Tris/HCl (pH7.4) containing 1 mM PMSF and EDTA-free Complete mini, protease inhibitor (Roche). Preferably, the PMSF/protease inhibitor is added to the buffer just prior to resuspension due to the limited stability of PMSF/protease inhibitor in aqueous solution. After resuspension the samples were frozen at −20° C. for later lysis and purification of UGT protein.

### Example 2—Purification of UGTs from E. coli Expression Cultures

[0284] Crude protein extracts were prepared by thawing the the frozen samples from example 1 at 30° C. for 5 minutes, followed by addition of lysozyme to lyse cells. Upon lysis of cells the lysate became viscous due to release of of genomic DNA. Samples were incubated on ice for 30 min to ensure cell lysis.

[0285] UGTs in the samples were isolated using His MultiTrap HP plates (GE Healthcare) according to instructions provided with the plates and using ice stored binding and elution buffers. Double eluates of a total volume of 250 μL were gently mixed with 250 μL pure glycerol and stored at −20° C.

### Example 3—In Vitro Test of Glucosylation of Oripavine and Nororipavine by UGTs

[0286] Glucosylation samples of a 20 μL total reaction volume for each UGT to be tested were prepared in 96-well microtiter plates as follows:

TABLE 17

| | | |
|---|---|---|
| Purified UGT enzyme of example 2 | 5 | μl |
| 25 mM Oripavine or Nororipavine | 0.4 | μl |
| 1 M Tris-HCl, 50 mM MgCl2, | 2 | μl |
| 10 mM KCl pH 7.4 | | |
| Milli-Q H2O | 11.9 | μl |
| FastAP phosphatase (1 U/μL) | 0.2 | μl |
| ThermoFisher Scientific | | |
| (catalog no. EF0651) | | |
| 50 mM UDP-Glucose | 0.5 | μl |
| Total Volume | 20 | μl |

[0287] The microtiter plate was sealed with an adhesive seal, spun shortly and the glucosylation samples were incubated overnight at 30° C. After incubation, glucosylation reaction was terminated by adding 3 volumes (60 μL) of ice-cold 100% methanol the reaction volume and mixing well, followed by centrifugation of the plate at 3000 rpm for 5 min at 4° C. and analysis by HPLC.

### Results

[0288] Production of glucosylated oripavine and/or nororipavine by UGTs capable of catalysing the reaction on one or both the acceptors is shown in FIG. 1 as well as for the subset of subfamily 72 UGT's in FIG. 8. It is observed that subfamily 72 UGTs Qs72S_1 (XP_023905554), KAF3968554, XP_023905565, XP_030967178, XP_023876189, XP_023875154, KAF3968553, and XP_023914549 seemed to have a particularly strong preference for Nororipavine glucosylation compared to oripavine glucosylation, especially Qs72S_1 (Quercus suber) and KAF3968553, while for subfamily 71 UGTs PWA70520 and SrUGT71E1 had preference for glucosylation of nororipavine compared to oripavine (the latter also shown by expression in yeast, see below). Subfamily 73 UGTs were generally good at both nororipavine and oripavine glucosylation, although some had a very strong preference for oripavine glucosylation, such as PWA37695.

### Example 4—Construction and Test of Yeast Strain Expressing UGTs In Vivo Glucosylating Oripavine and/or Nororipavine

[0289] A Saccharomyces cerevisiae strain, sOD504, was constructed by modifying background strain sOD157 by genomic integration using the Saccharomyces cerevisiae gene integration and expression system developed by Mikkelsen, M D et al. (2012).

[0290] The genes SEQ ID NO: 237 and SEQ ID NO: 160 were integrated into the site X-3 of the Saccharomyces cerevisiae strain using the Saccharomyces cerevisiae TDH3 and TEF2 promoters respectively to drive transcription. Selection for transformants was done using the well-known Kluyveromyces lactis LEU2 marker and growth on media lacking leucine.

[0291] Subsequently, the genes SEQ ID NO: 233 and SEQ ID NO: 160 were integrated into the site XI-2 of the Saccharomyces cerevisiae strain using the Saccharomyces cerevisiae TDH3 and TEF2 promoters respectively to drive transcription. Selection for transformants was done using the well-known Schizosaccharomyces pompe HISS marker and growth on media lacking histidine.

[0292] Finally, multiple copies of the genes SEQ ID NO: 154 and SEQ ID NO: 239 were integrated into the previous mentioned strain background by Ty integration. Method of Ty genomic integration was modified based on system developed by Maury, J et al. 2016. The SEQ ID NO: 154 and SEQ ID NO: 239 genes were expressed using the well-known Saccharomyces cerevisiae TDH3 and TEF2 promoters, respectively. Ty expression of the genes was integrated by using the Kluyveromyces lactis URA3 marker as selection marker for growth on media lacking uracil (described e.g. by Mikkelsen, M D et al. (2012).

[0293] The created sOD398 strain was then made leucine auxotrophic by replacement of the Kluyveromyces lactis LEU2 marker with the NatMX dominant marker, creating strain sOD504. sOD504 was capable of efficient demethylation of oripavine to nororipavine when oripavine was supplemented to the growth medium. This strain was used as test strain for expression of the UGT genes listed in Table 18.

[0294] Genes of UGTs from families 71, 72 and 73 were codon optimized for expression in yeast and synthesized and the UGT genes were inserted in P415-TEF vector (Mumberg D, et al. (1995)). UGT ORFs were inserted between the SpeI and XhoI sites yielding plasmids shown in the second column of Table 18.

[0295] For each plasmid transformation three individual colonies were tested. The test strains were cultivated in 96-deep-well-plate (DWP) format. Cells were grown in 0.5 ml SC-His-Leu-Ura medium at 30° C. with shaking at 280 rpm in ISF1-X Kuhner shaker for 20-24 hours and utilized as precultures for in vivo bioconversion assays. 50 μl of the overnight cell cultures were then grown in 450 μl DELFT minimal medium with 4 mM oripavine or 4 mM nororipavine and cells were grown for 72 hours with shaking at 280 rpm.

[0296] For HPLC UV analysis, 50 μl of cell cultures were transferred to a new 96-deep-well-plate containing 50 μl of MilliQ water with 0.1% of formic acid. The harvested 96 well plate was incubated at 80° C. for 10 minutes. Plate was then centrifugated for 10 minutes at 4000 rpm. The supernatants were then diluted in MilliQ water with 0.1% of formic acid to reach a final dilution of 1:40 before HPLC analysis.

TABLE 18

| # | Plasmid | UGT | subfamily | Sequence |
|---|---|---|---|---|
| E2 | pOD1921 | KAD3640082_ScOpt | 71 | SEQ ID |
| | | | | NO: 10 |
| E3 | pOD1922 | XP_023746016_ScOpt | 73 | SEQ ID |
| | | | | NO: 59 |
| E4 | pOD1923 | XP_021998812_ScOpt | 71 | SEQ ID |
| | | | | NO: 24 |
| E5 | pOD1924 | PWA36889_ScOpt | 73 | SEQ ID |
| | | | | NO: 54 |
| E6 | pOD1925 | KAD3640181_ScOpt | 71 | SEQ ID |
| | | | | NO: 16 |
| E7 | pOD1926 | KAD3640084_ScOpt | 71 | SEQ ID |
| | | | | NO: 14 |
| E8 | pOD1927 | KAD3640083_ScOpt | 71 | SEQ ID |
| | | | | NO: 12 |
| E9 | pOD1928 | XP_023770764_ScOpt | 71 | SEQ ID |
| | | | | NO: 27 |
| E10 | pOD1929 | UGT73-11 | 73 | — |
| E11 | pOD1930 | GEU38196_ScOpt | 73 | SEQ ID |
| | | | | NO: 50 |
| E12 | pOD1931 | KAD4384427_ScOpt | 73 | SEQ ID |
| | | | | NO: 52 |
| E13 | pOD1937 | KAF3968553_ScOpt | 72 | SEQ ID |
| | | | | NO: 33 |
| E14 | pOD1938 | XP_023914549_ScOpt | 72 | SEQ ID |
| | | | | NO: 45 |
| E15 | pOD1939 | KAF3968554_ScOpt | 72 | SEQ ID |
| | | | | NO: 35 |
| E16 | pOD1940 | XP_023905565_ScOpt | 72 | SEQ ID |
| | | | | NO: 43 |
| E17 | pOD1941 | XP_030967178_ScOpt | 72 | SEQ ID |
| | | | | NO: 48 |
| E18 | pOD1942 | UGT72-16 | 72 | — |
| E19 | pOD1943 | UGT72-12 | 72 | — |
| E20 | pOD1950 | XP_023875154_ScOpt | 72 | SEQ ID |
| | | | | NO: 39 |
| E21 | pOD1951 | SrUGT73E1_opt | 73 | SEQ ID |
| | | | | NO: 57 |
| E22 | pOD1952 | Qs72S1_opt | 72 | SEQ ID |
| | | | | NO: 37 |
| E23 | pOD1953 | SrUGT71E1_opt | 71 | SEQ ID |
| | | | | NO: 22 |

### Results

[0297] Bars in FIG. 2 show values in μM glucosylated Oripavine (Oripavine_Glu) and μM glucosylated Nororipavine (Nororipavine_Glu). UGTs from subfamilies 71, 72 and 73 were capable of glucosylating Oripavine and Nororipavine when the sOD504 strain was expressing the UGTs and oripavine was fed to the growth medium. Both subfamily 71 UGTs and subfamily 72 UGTs were shown to produce more glucosylated Nororipavine compared to glucosylated Oripavine. All subfamily 72 UGTs that were tested and shown to be active in yeast, proved to be highly specific for glucosylation of Nororipavine.

### Example 5 Construction of Yeast Strain Expressing UGT Glucosylating Nororipavine and Test of Nororipavine Glycosylation on Strain Vitality/Growth and Total Nororipavine Production

[0298] Strain sOD157 was modified into strain sOD507 by genomic integration using the Saccharomyces cerevisiae gene integration and expression system developed by Mikkelsen, M D et al. (2012).

[0299] The genes SEQ ID NO: 235 and SEQ ID NO: 160 were integrated into the site X-3 of sOD157 using the Saccharomyces cerevisiae TDH3 and TEF2 promoters respectively to drive transcription. Selection for transformants was done using the Kluyveromyces lactis LEU2 marker and growth on medium lacking leucine.

[0300] Subsequently, the genes SEQ ID NO: 255 and SEQ ID NO: 257 were integrated in multiple copies into the previous mentioned strain background by Ty integration. The method of Ty genomic integration was modified based on system developed by Maury, J et al. 2016.

[0301] The SEQ ID NO: 255 and SEQ ID NO: 257 genes were expressed using the well-known Saccharomyces cerevisiae TDH3 and TEF2 promoters respectively. Selection for Ty integration of the genes was done by using Schizosaccharomyces pompe HISS marker and growth on media lacking histidine (described e.g. by Mikkelsen, M D et al. (2012).

[0302] Finally, multiple copies of the genes SEQ ID NO: 249 and SEQ ID NO: 257 were integrated into the previous mentioned strain background by Ty integration. Method of Ty genomic integration was modified based on system developed by Maury, J et al. 2016. The SEQ ID NO: 249 and SEQ ID NO: 257 genes were expressed using the well-known Saccharomyces cerevisiae TDH3 and TEF2 promoters respectively. Ty expression of the genes was integrated by using the Kluyveromyces lactis URA3 marker as selection marker for growth on media lacking uracil (described e.g. by Mikkelsen, M D et al. (2012).

[0303] Strain sOD507 was further modified into strain sOD515 expressing the gene SEQ ID NO: 33 encoding a UGT72 shown to be capable of efficient and specific glucosylation of nororipavine. K SEQ ID NO: 33 was integrated into the site XII-2 of the Saccharomyces cerevisiae strain using the Saccharomyces cerevisiae TDH3 promoter to drive transcription. Selection for transformants was done using the well-known HygMX marker and growth on solid YPD medium containing Hygromycin.

[0304] To test if glucosylation of produced nororipavine in an oripavine-to-nororipavine converting yeast strain was beneficial for vitality/growth and total nororipavine production titer of the strain, performance of strains sOD507 and sOD515 in fed-batch fermentations supplemented with oripavine, were compared after 66 hours of fermentation.

### Fermentation Process and Fermentation Process Parameters

### Seed Train Preparation

[0305] Day 1—Preparation of pre-seeding cultures: from a frozen glycerol stock a suitable number of cells was transferred into culture tubes containing about 5 ml of seed-train medium. Culture tubes were then incubated on an orbital shaker (180 rpm) at 30° C. for c.a. 24 h in order to reach a final OD600 of about 3-4

[0306] Day 2—Preparation of seeding cultures: seeding cultures were prepared in 250 mL Erlenmeyer flasks each containing 60 mL of seed-train medium. Each flask was inoculated with a suitable amount of yeast cells which were harvested at the end of the previous propagation step. Seeding cultures were initiated with a starting OD of about 0.05 and then incubated on an orbital shaker (180 rpm) at 30° C. for c.a. 30 h in order to reach a final OD600 of about 5-6

[0307] Day 3—Inoculation of 2 liter fermentor: The batch-phase was started with a fixed working volume consisting in 500 mL of fresh broth. The fermentor was inoculated by transferring into the vessel 50 mL of the seeding culture (with an initial OD of 0,5-0,6) after removal of an equal volume of batch medium.

### Process Parameters for Batch & Fed-Batch Phases of Cultivation

[0308] The fermentation process was operated as a series of two stages carried out in the same vessel. During the first stage, that coincided with the first 8 hours of cultivation run, the yeast culture was grown batchwise in 0.5 L of batch medium: the temperature was set at 28° C. while the pH value was kept around a set point of 5.5, and automatically controlled during the cultivation by adding 12.5% ammonium hydroxide with a peristaltic pump. Fully aerobic conditions were ensured by flowing 1 vvm of air through the vessel; stirring was kept at a constant rate of 1100 rpm.

[0309] At the end of the 8 hours of batch run the second fed-batch phase was initiated by starting the glucose feed. Process parameters for the fed-batch phase were again the same used during the previous batch phase (i.e., Temperature=28° C., pH=5.5, Aeration rate=1 vvm, Stirring rate=1100 rpm). In particular, the air flow was increased stepwise in order to compensate for the increase in volume and to maintain the aeration rate value at around 1 vvm during the course of fermentation. In addition, the pH was reduced to a value of 4.5 after 64 hours from the start of the overall cultivation process. Finally, 6.0 g of Oripavine powder were fed into the cultivation vessel after approx. 66 hours of fermentation run. The addition of oripavine resulted in a pH increase, which was counterbalanced by adding phosphoric acid solution with a syringe trough an injection port.

### Feeding Strategy (Dosage, Profile, Control-Trigger)

[0310] A constant specific growth rate (μ) strategy was employed for feeding the fed-batch medium to the fermentation consisting of four consecutive exponential feeding phases where each one of them was occurring at a different specific growth rate value. The conditions for the four phases are summarized in the below Table 19:

TABLE 19

| | μᵢ | Xᵢ | Vᵢ | | Air flow |
|---|---|---|---|---|---|
| | [h⁻¹] | [g/L] | [L] | t [h] | (ccm/min] |
| Phase1 | 0.080 | 1.5 | 0.500 | (0) 8 | 620 |
| Phase2 | 0.040 | 54.32 | 0.618 | (48) 56 | 750 |
| Phase3 | 0.025 | 94.42 | 0.752 | (67) 75 | 950 |
| Phase4 | 0.012 | 162.50 | 0.947 | (90) 98 | 1300 |
| End | 0.012 | 200.61 | 1.407 | (143) 151 | 1400 |

[0311] The actual growth rate value during the fed-batch cultivation was primary controlled by the feeding rate profile of the main limiting substrate (glucose).

[0312] The actual volumetric feed rate F [L·h⁻¹, (mL·min⁻¹)] was calculated according to the following equation:

F=Fᵢ exp(μᵢt)
[0313] where
[0314] Fᵢ, initial volumetric feed rate [L·h⁻¹, (mL·min⁻¹)]
[0315] μᵢ, specific feed rate for the constant specific growth rate phase [h⁻¹]

$${F}_{i} = {μ}_{i} \frac{{X}_{i} {V}_{i}}{{Y}_{X / S} {S}_{F}}$$

[0316] with:
[0317] Xᵢ, dry microbial mass concentration in the culture vessel at the start of the phase [g·L⁻¹]
[0318] Xᵢ, volume of the culture at the start of the phase [L]
[0319] S_{F}, glucose concentration in the feed=620 g·L⁻¹
[0320] Y_{X/S}, microbial mass yield on the limiting substrate (i.e., glucose)=0.45

[0321] The transition from each one of the four phases to the next one was based on a previously optimized time profile that was able to guarantee that the system did not suffer from oxygen limitation during the course of each exponential phase.

### Results of Fed-Batch Fermentation

[0322] The results of the fermentations of strains sOD507 and sOD515 are shown in FIG. 3 and FIG. 4. Here it is demonstrated that once oripavine is fed to the batch after some 66 hours and the strain starts converting the oripavine to nororipavine, the expression of an UGT enzyme glucosylating the produced nororipavine dramatically increase both vitality of the strain (expressed as biomass, g/I) and production of nororipavine.

### Example 6 In Vitro Deglucosylation of Nororipavine Glucoside

[0323] Nororipavine can serve as a starting point for chemical conversion into buprenorphine and nal compounds (see eg. WO2018211331 and PCT/EP2021/050692 (unpublished), so it is desirable to provide an efficient and cost effective deglycosylation of nororipavine glucosides as part of an isolation and/or purification process. Accordingly, 15 commercially available glucosidase enzyme blends listed in Table 20 were tested for in-broth ability to deglucosylate nororipavine. 1% of enzyme blends was added to 99% broths of example 5 containing nororipavine and nororipavine glucoside and the mixtures, included a blank control (Start) were incubated at three different conditions (1 h+pH 5,5+room temperature, 1 h+pH 5,5+50° C. and 24 h+pH 5,5+room temperature). At the end of each experiment any deglucosylation activity was stopped by adding 99.9% ethanol to the broth at a ratio of 1:14.7 broth:ethanol. The broths were centrifuged at 1470 rpm for 5 min and the supernatants were diluted with 0.1% Formic acid for HPLC analysis.

TABLE 20

| Nr. | Name |
|---|---|
| 1 | Biocatalysis-Depol 40L-D040L |
| 2 | Biocatalysis-Depol 670L-D670L |
| 3 | Biocatalysis Depol 692L-D692L |
| 4 | Biocatalysis-beta-glycosidase-G016L |
| 5 | Genencor Optimate CX 15 |
| 6 | Dupont TS + E 17 |
| 7 | Novozymes-NS-11033-KTN04002 |
| 8 | Novozymes-NS-11034-KTN02243 |
| 9 | Novozymes-NS-11035-CCNF0047 |
| 10 | Novozymes-NS-11036-CNNBC028 |
| 11 | Novozymes-NS-11037-CNN02249 |
| 12 | Novozymes-NS-11038-CNNB0162 |
| 13 | Dupont TS-E 2017 |
| 14 | Novozym 188-DCN00206 |
| 15 | Viscozyme L-KTN02137 (Novozymes) |

### Results

[0324] As shown in FIG. 5, FIG. 6 and FIG. 7, several enzyme blends converted glycosylated nororipavine into nororipavine. Values shown by bars are in g/I in all three figures. The enzyme blends had a significantly increase activity at 50° C. compared to room temperature. Full deglucosylation was observed for all enzyme blends after 24 hours at room temperature. For enzyme blends 5, 6, 13 and 14 full deglucosylation was observed after only 1 hour at 50 degree Celsius.

### Example 7 Selection of UGT Having Specificity Towards Nororipavine

[0325] UDP glycosyltransferases (UGTs) are not highly homologous at the protein sequence level, although recognizable domains and binding sites are ubiquitous throughout the superfamily, and allow one to identify the proteins as UGTs (also called “signature sequences”). They are classified into families and subfamilies according to methods published by PI Mackenzie et al., 1997. Only a limited numbers of the evaluated UGTs in Table 5 displayed activity on nororipavine and these fell into the families UGT71, UGT72, and UGT73. This classification was confirmed upon blasting protein sequences against the publicly available database of Arabidopsis thaliana glycosyltransferase found at http://p450.kvl.dk/ and comparing nororipavine glycosylating UGT candidates with the Arabidopsis UGTs, and assigning the candidate into the family of the closest homolog from Arabidopsis thaliana.

[0326] The 72UGTs of Table 5 were tested in vitro to using the test setup of example 3 identify those having having specificity toward nororipavine.

### Results

[0327] The performance of the 72UGTs glucosylating oripavine and/or nororipavine is shown in FIG. 8. The 72UGTs: Qs72S_1 (XP_023905554), KAF3968554, XP_023905565, XP_030967178, XP_023876189, XP_023875154, KAF3968553, and XP_023914549 had a strong preference for nororipavine glucosylation compared to oripavine glucosylation. Qs72S_1 (Quercus suber) was particularly good. Five of these enzymes showed a particularly high specificity for nororipavine compared to oripavine: Qs72S_1, XP_030967178, XP_023876189, XP_023875154, and KAF3968553. Qs72S_1 even demonstrated both high activity and high specificity, which is particularly useful.

### Example 8 Homologies and Analysis of 72UGTs

[0328] The protein sequences for UGT72s of Table 5 where analysed and compared by full length sequence alignment.

### Results

[0329] The alignment demonstrated a significant variation in homology between the subfamily 72 UGTs. The homology as percent identity between the enzymes with glycosylation specificity towards on nororipavine were as low as 62%; although most were >74% identity to QS725_1. The enzymes with the highest activity under the conditions tested had >78% identity to QS72_1.

### Example 9 Analysis of 72UGTs Having Specificity to Nororipavine

[0330] The UGTs of FIG. 8, including the UGTs found to have the highest specificity for nororipavine, Qs725_1 (XP_023905554), KAF3968554, XP_023905565, XP_030967178, XP_023876189, XP_023875154, KAF3968553, and XP_023914549, were compared by full length alignment as shown in Table 21. The sequences of an additional 19 UGTs that were not active in this assay were also examined, and in particular 4 subfamily 72 UGT members that did not have activity for nororipavine glycosylation were compared to active UGT72 subfamily members. In the alignment the active site/binding site residues are bolded and underlined and were found to include G16, H17, 119, 1169, H172, G173, 1177, L200, 5271, H360, G362, N364, 5365, and E368, using numbering of the non-gapped QS72_1 protein sequence (SEQ ID NO: 96). Residue H17 is thought to part of the sugar acceptor binding site. Structural predictions are based on Structure 1PN3 and 1RRV crystal structures (AM Mulichak, et al, 2003 and AM Mulichak et al, 2004). It should be noted that amongst the active proteins, some conservative substitution at these sites appears to be tolerated. Whereas the H17 region is absolutely conserved, 1169 in some cases is V169 in active enzymes, and 1177 can be substituted for other aliphatic amino acids such as L, S, A and still maintain activity, but substitution with methionine was noted for several UGTs lacking activity for nororipavine as a substrate (data not shown). G173, 5271, H360, G262, N364, 5365 and E368 appear to be conserved in the proteins studied, whereas some of the proteins lacking activity in this assay have substitutions of Q, Y, K, L, or P at position 172 instead of H or M, S, Q at position 200 instead of L (data not shown).

TABLE 21

| | |
|---|---|
| Qs72_1 | ----MEQKPHIALLPSPGMGHLIPLVEFAKQFVLHH--DFHITCIIPVLGSPSKAMKAVL |
| XP_023875154 | MLSKMEQKPHIALLPSLGMGHLIPLVEFAKQFVLHH--DFHITCIIPVLGSPSKAMKAVL |
| KAF3968553 | ----MEQKPHIALLPSPGMGHLIPLVEFAKLFVLHH--DFRITCIIPVLGSPSKAMKAVL |
| XP_023914549 | ----MEQKPHIALLPSPGMGHLIPLVEFAKQFVLHH--DFRITCIVPVLGSPSKAMKAVL |
| KAF3968554 | ----MEQKPHIGILPSPGMGHLIPLVEFAKLLVHHH--DFNITCIIPVLGSPSKAMKAVL |
| XP_023905565 | ----MEQKPHIALLPSPGMGHLVPLVELAKLLLLHH--DFHITCIIPVLGSPSKAMKAVL |
| XP_030967178 | ----MEQKPHIALLPSPGMGHLIPLVELAKLLLLHH--DFHITCIIPVLGSPSKAMKAVL |
| XP_023876282 | ----MEQKPHIAIFPSPGMGHLIPHLELAKLLALHH--NFHITCIISVLGSPSRAMKEVL |
| XP_023876189 | ----MEQKPHIAILPSPGMGHLIPFVEFAKLLLLHH--DFHITCIIPTIGSPSKAMREVL |
| XP_023923919 | ----MDQKPHIALLPSPGMGHLIPLVEFAKLLLHHH--GFHITCIIPTTGSPSKAMKEVL |
| KAB1219588 | MESTHTQASHIAILPTPGMGHLIPLVEFAKRLLHHHPNSFNITFIIPTDGPPSKAQKSVL |
| | * ** * ***** * * ** ** * ** * * ** * ** |
| Qs72_1 | QALPTTIDHVFLPPVILEEEEIKGLKFEVQTILTLTRSLPPLREVLKT----TRFSAFVV |
| XP_023875154 | QALPTAIDHVFLPPVKLEEEEIKGLKFEVQTILTLTRSLPPLREVLKS----TRFSAFVV |
| KAF3968553 | QALPTTIDHVFLPPVILEEEEIKGLKFEVQTILTLTRSLPPLRDVLKS----TRFSAFVV |
| XP_023914549 | QALPTTIDHVFLPPVKLEEEEIRGLKFEVQTILTLTRSLPPLREVLKS----TRFSAFVV |
| KAF3968554 | HALPTTIDHVFLPPVILEEEEMKGPRFEVQTILTLTRSLPPLRDVLKS----TRFSAFVV |
| XP_023905565 | QALPTSIDHVFLPPVILEEEEIKGLKLEVQAMLTLTRSLPPLRDVLKS----TRFSAFVV |
| XP_030967178 | QALPTSIDNVFLPPVILEEEEIKGLKLEVQAMLTLTRSLPPLRDVLKS----TRFSAFVV |
| XP_023876282 | QALPTSIDHVFLPPV--SSEDLEGLLPEVQTILTLTRSLPPLRDVLKS----TRFAAFIV |
| XP_023876189 | QALPTSIDHVFLPPVSL--EELGGVKPGIQITLTMIRSLPPLREVLTSLVATTRLVALVV |
| XP_023923919 | QALPTSIEHVFLPPVNL--EDLKGAKPGLQIALTMTRSVPSLRDVLTSLVATTRLVALVV |
| KAB1219588 | DALPSSMNYFFLPEVNLD-DVPKGAKIESLISLTVVRSLPSLREVLKSLVESSKLVAFVV |
| | *** *** * * ** ** * ** ** * * |
| Qs72_1 | DPFGIDALDIAKELNISPYIFFPSNAFALSLIFHLPKLDETVSCEYRDLPEPLKLPGCIP |
| XP_023875154 | DPFGIDALDIAKELNISPYIFFPTNAFALSLIFHLPKLDETVSCEYRDLPEPLKLPGCIP |
| KAF3968553 | DPFGIDALDIAKELKISPYIFFPTNAFVLSLMFHLPKLDETVSCEYRDLPEPLKLPGCIP |
| XP_023914549 | DPFGIDALDIAKELNISPYIFFPTNAFALSLIFHLPKLDKTVSCEYRDLPEPLKLPGCIP |
| KAF3968554 | DPFGIDALDIAKELNISPYIFFPTNAFALSLIFHLPKLDETVSCEYRDLPEPLKLPGCIP |
| XP_023905565 | DPFGIDALDIAKELNISPYIFFPSNAFALSLVLHLPKLDETVSCEYRDLPEPIKLPGCIT |
| XP_030967178 | DPFGIDALDIAKELNISPYIFFSSNAFALSLVLHLPKLDETVPCEYRDLPEPVKLPGCIP |
| XP_023876282 | DTFGMDALDVAKEFNISPYIFFLSNAFALSLVLHLPKLDETISGEYRDQAEPLKLPGCVP |
| XP_023876189 | DLFGTDALDVAKELNVSPYIFYPTNAMVVSLVLHLPKLDETVSCEYRDLPEPVKLPGCVP |
| XP_023923919 | DPFAIDALDVAKELNVSPYIFYPANAMVLSLLLNLPKLDETVSCEYRDLPEPVKLPGCIP |
| KAB1219588 | DLFGTDAFDVARELNVSPYIFYPSTAMALSLFLYLPKLDEMVTCEYRDHPEPVKIPGCIP |
| | * * ** * * * ***** * ** ***** **** ** * *** |
| Qs72_1 | IHGRDLIEPVQDRTSELYKMFLRNAKRFRLAEGIIVNTFMELEGSAIKALLDEEAKNLPL |
| XP_023875154 | IHGRDLLEPVQDRTSELYKMFLRNAKRFRLAEGIIVNTFMELEGSAIKALLDEEAKNLPL |
| KAF3968553 | IHGRDLIEPVQDRTSELYKMFLRNVKRFRLAEGIIVNTFMELEGSAIKALLDEEAKNLPL |
| XP_023914549 | IHGRDLSEPVQDRTSELYKMFLRNAKRFRLAEGIIVNTFMELERSAIKALLDEEAKNLPL |
| KAF3968554 | IHGRDLAEPFQNRTSESYKMFLRIAKRFRLAEGIIVNTFMGLEGSAIKALLEEEAKNLPL |
| XP_023905565 | IHGRDLLEPVQDRTSELYKMFLSNTKRYRLAEGIIVNTFMELEGSAIKALLEEEAKNLPL |
| XP_030967178 | IHGRDLIEPVQDRTSELYKMFLTNAKRYRLAEGIIVNTFMELEGSAIKAMLEEEAKNLPL |
| XP_023876282 | IHGRDLAEPVQDRTSYWYKMFLRSTKRMRLAEGIMENTFMELEENAIKALLDEEAKSLPL |
| XP_023876189 | IHGRDLLDPIQDRTTELYKLFLRGAKWLRLVEGIIVNTFMELDGNVIKALEDEEAKSGTI |
| XP_023923919 | IHGRDLIDPIQDRTSEWYKLILRWAKQMRLAEGIIVNTFMELDGNAITALE-EEAKNLSL |
| KAB1219588 | IHGKDLLDPVQDRKNDAYKWLLHHAKRYRLAEGILTNSFLELEPGAIEALQAEEPGKPPV |
| | *** ** * * * ** * * ** *** * * * * * ** |
| Qs72_1 | YPIGPI-QSGSSNLQVDKSVSDCLRWLDNQPHGSVLFVCFGSGGTLSYDQTNELALGLEL |
| XP_023875154 | YPIGPI-QSGSSN-QVDKSESDCLRWLDNQPHGSVLFVCFGSGGTLSYDQTNELALGLEL |
| KAF3968553 | YPIGPI-QSGSSNLQVDKSESDCLRWLDNQPRGSVLFVCFGSGGTLSYDQTNELALGLEL |
| XP_023914549 | YPIGPI-QSGSSN-QVDKSESDCLRWLENQPHGSVLFVCFGSGGTLSYDQTNELALGLEL |
| KAF3968554 | YPVGPI-QSGSSN-QVE--ESDCLRWLGNQPHGSVLFVCFGSGGTLSYDQTNELALGLEL |
| XP_023905565 | FPVGPI-QSGSSN-QVDKSESDCLRWLDNQPHGSVLFVCFGSGGTLSYDQTNELALGLEL |
| XP_030967178 | FPVGPI-QSGSSN-QVDKLESDCLSWLDNQPHGSVLFVCFGSGGTLSYEQTNELALGLEL |
| XP_023876282 | YPIGPIIQTGSSN---QFKGSDCLRWLDSQPHGSVLFVCFGSGGTLSYEQTNELAFGLEL |
| XP_023876189 | YTIGPIIQSSSTK-HVEG--SDGLRWLDNQPRGSVLFVCFGSGGTLSYDQMKELALGLEL |
| XP_023923919 | YTVGPIIQSGSSN-QVEG--SDCLRWLNNQPSGSVLFVCFGSGGTLSYDQMNELALGLEL |
| KAB1219588 | YPVGPLVNMGSSG-KVDG--SECLKWLDEQPHGSVLFVSFGSGGTLSTNQMNELALGLEK |
| | ** * * * ** ** ****** ******** * *** *** |
| Qs72_1 | SGQKFLWVVRTPNNESADAAYLSDQILDNNPLDFLPKGFVERTEGQGLAVPSWAPQAQVL |
| XP_023875154 | SGQKFLWVVRTPNNESADAAYLSDQTLNNNLLAFLPKGFVERTEGQGLAVPSWAPQAQVL |
| KAF3968553 | SGQKFLWVVRTPDNESADAAYLSDQTLDNNPLAFLPKGFVERTEGQGLAVPSWAPQAQVL |
| XP_023914549 | SGQKFLWVVRTPNNESADAAYLSDQTLDNNPLAFLPKGFVERTEGQGLAVPSWAPQAQVL |
| KAF3968554 | SGQKFLWVVRTPNNESADAAYLSDQTLYNNPLAFLPKGFVERTEGQGLAVPSWAPQAQVL |
| XP_023905565 | SGQKFIWVVRTPNNESADATYLSDQTLGNNPLAFLPKGFVERTKGQGLVVPFWAPQAQVL |
| XP_030967178 | SGQKFIWVVRTPNNESADATYLSDQNLGDNPLAFLPKGFVERTKGQGLVVPLWAPQAQVL |
| XP_023876282 | SEQKFLWVVRTPNNESAGASYLSDQTLENNPLTSLPKGFVERTKGQGLVVPSWAPQVQVL |
| XP_023876189 | SKQKFLWVVRSPNNELAQAAYFSDQTLDNNPLSFLPVGFIERTKEQGLVVPSWAPQAQVL |
| XP_023923919 | SKQKFLWVVRSPNNGLANAAYLADQTLDNNPLAFLPKGFIERTKEQGLVVPYWAPQAQVL |
| KAB1219588 | SEQRFLWVVRTPNDHVANATYFSVQS-EKDPFDFLPKGFLERTKGRGLVLPSWAPQAQVL |
| | * * * **** * * * * * ** ** *** ** * **** *** |
| Qs72_1 | SHGSTGGFLTHCGWNSTLESIMQGIPLIAWPLYAEQKMNAPLLAEDLKVALRPKTNKSGL |
| XP_023875154 | SHGSTGGFLTHCGWNSTLESIMQGIPLIAWPLYAEQKMNAPLLAEDLKVALRPKTNKNGL |
| KAF3968553 | SHGSTGGFLTHCGWNSTLESIMQGIPLIAWPLYAEQKMNAPLLAEDLKVALRPKTNKNGL |
| XP_023914549 | SHGSTGGFLTHCGWNSILESVMQGIPLIAWPLYAEQKMNAVLLAEDLKVALRPKTNKNGL |
| KAF3968554 | SHGSTGGFLTHCGWNSSLESIMQGIPLIAWPLYAEQKMNAVLLAEDLKVALRPKTNKNGL |
| XP_023905565 | SHGSTGGFLTHCGWNSTLESIMQGIPLIVWPLFAEQKMNAALLAEDLKVALRPKTNKNGR |
| XP_030967178 | SHGSTGGFLTHCGWNSTLESIMQGIPLIVWPLFAEQKMNAALLAEDLKVALRPKTDKNGL |
| XP_023876282 | SHSSTGGFLSHCGWNSTLESVMQGIPLIAWPLFAEQRMNAVLLAEDLKVALRPKANEKGL |
| XP_023876189 | SHDSTGGFLSHCGWNSTLESIMQGIPLIAWPLFAEQRMNALLLTEDLKVALRPKANEKNL |
| XP_023923919 | SHGSTGGFLSHCGWNSTLESIMHGIPIIAWPLFAEQRMNAVLLTEDLKVALRPKANEKGL |
| KAB1219588 | SHSSTGGFLTHCGWNSILESVVNGVPLIAWPLYAEQKMNAVMLTEDIKVALRPKFNDNGL |
| | ** ****** ****** *** * * * *** *** *** * ** ******* |
| Qs72_1 | IDQEEIAKVVKGLMIGEEGKKVYNRMKDIKMAAEKALSADGSSTKALSELASQWKNHPG- |
| XP_023875154 | IDREEIAKVVKGLMIGEEGKKVYNRMKDIKMAAEKALSADGSSTKALSELASQWKNHPGF |
| KAF3968553 | IDREEIAKVVKGLMVGEEGKKVHNRMKDIKIAAEKALSADGSSTKTLSELASQWKNHPGF |
| XP_023914549 | IDREEIAKVVKGLMVGEEGKKVRNRMKDIKIAAVKALSADGSSTKALSELASQWKNHPGF |
| KAF3968554 | IDREEIAKVVKGLMDGEEGKKVRNRMKDIKIAAEKALNVDGSSTKTLSKLASKWKNHSSF |
| XP_023905565 | IDREEITKVVKGLMVGEEGKKVRNRMKDIKIAAEKALSADGSSTKALSKLATQWKNHSDF |
| XP_030967178 | IDREEIAKVVKGLMVGEEGKKVHNRMEDIKIAAEKALSADGSSTKALSKLATQWKNHPDF |
| XP_023876282 | VHRDEIAKVVKGLMVGEEGKKVHSRMKDLKDAAEKALSVDGSSTKALTDLALHWTNQARF |
| XP_023876189 | VDREEIAKVIKSLMVGEDGKKIHSRMKDLKIAAEKALSPNGPSTKALADLASHWTNQSNS |
| XP_023923919 | VDREEIAKVIKGLMVGEEGKKVHSRMKELKIAADKAVSPYGSSTKALADIASRWTNGPDF |
| KAB1219588 | AGREEIAKVAKALMEGEEGKRLRSHMKNLKDAAARVLSEDGSSTKALSELALKWKNKK-- |
| | ** ** * ** ** ** * * ** * *** * * * * |
| Qs72_1 | -- |
| XP_023875154 | -- |
| KAF3968553 | -- |
| XP_023914549 | -- |
| KAF3968554 | -- |
| XP_023905565 | -- |
| XP_030967178 | -- |
| XP_023876282 | -- |
| XP_023876189 | -- |
| XP_023923919 | RT |
| KAB1219588 | -- |

### Example 10 Effect of N-Terminal Tags on UGT Activity

[0331] A strain was constructed to test whether different N-terminal tags on a UGT had an effect on nororipavine or oripavine glucosylation efficiency or specificity. Strain sOD157, described in the Materials and Methods section, was transformed to integrate an expression cassette that expresses a CYP450 N-demethylase (SEQ ID NO: 258) from a strong constitutive promoter. Suitable promotors include for example these described in WO2021069714.

[0332] Next, this strain was transformed simultaneously with 3 different episomal CEN/ARS based yeast expression plasmids. The first plasmid was expressing the CYP450 reductase (CPR) SEQ ID NO: 260 from a strong constitutive promoter. The second plasmid was expressing a PUP (Purine Uptake Permease) from a strong constitutive promoter, suitable PUPs that work for bioconversion of oripavine to nororipavine can be found in example 12 below. The third plasmid was expressing the UGT SEQ ID NO: 97 or a modified version of these this gene with an ER anchor and a flexible linker fused in-frame to its N-terminus. Fifteen different linkers of varying length were fused to the anchor and in one case only the anchor sequence was used N-terminally to the UGT coding sequence.

[0333] Cells were grown overnight in SC-HLU and used to inoculate Delft pH 5.5 media containing 2 mM oripavine. After growth with shaking at 30 degrees Celsius for 3 days, total extracts were obtained by mixing the cultures with an equal volume of 0.2% formic acid and heating at 80 degrees Celsius for 10 minutes. After centrifugation, the supernatant was diluted in 0.1% formic acid for quantification by HPLC as described in the materials and methods.

[0334] In all 16 cases the fusion of the UGT to an ER membrane anchor lowered the activity of the expressed enzyme. Activity for glucosylation of nororipavine ranged from approximately 10-84% of the untagged UGT positive control. Surprisingly though, the N-terminal fusions to the UGT increased the specificity towards glucosylation of the nororipavine rather than the oripavine molecules. In nearly half of the experiments the specificity toward nororipavine glucosylation as compared to oripavine glucosylation was 100% within the limits of quantitation of the experiment. This was considered a great advantages as the process of N-demethylation of oripavine to nororipavine is impeded if the substrate oripavine is glucosylated and becomes unavailable for conversion to nororipavine and would create additional impurities that had to be removed in a purification process. These are factors which adversely affects the yield of the process and the cost.

[0335] Additional types of N-terminal tags were also tested. Ten different tags that impacted solubility were tested and compared to the activity with a UGT alone as described above. All 10 tagged glucosyl transferases were active. Half of those tested had higher amounts of glucosylated nororipavine than the untagged UGT alone (SEQ ID NO: 204, 208, 210, 212, 214, 216, and 218), the most active UGT fusion (SEQ ID NO: 218) had 140-150% of glucosylation activity of the untagged UGT for nororipavine and oripavine, respectively.

### Example 11 Verification of Nororipavine-Glycoside Structure by MS/MS

### A. Verification of Nororipavine-Glucoside

[0336] Extractions from strains producing glucosylated nororipavine were analysed on LC-MS-Q-TOF. Chromatography was performed on a Dionex Ultimate 3000 Quaternary Rapid Separation UHPC+ focused system (Thermo Fisher Scientific, Germering, Germany). Separation was achieved on a Kinetex 1.7 μM F5 column (100×2.1 mm, 1.7 μM, 100 Å, Phenomenex, Torrance, CA, USA), employing 0.05% (v/v) formic acid in H₂O and 0.05% formic acid in acetonitrile as mobile phases A and B, respectively. The gradient utilized was: 0-2 min 2% B; 2-13 min 2-30% B; 13-16.5 min 30-100% B; 16.5-18 min 100% B; 18-18.1 min 100-2% B; 18.1-20 min 2% B. The mobile phase flow was 300 μL/min. The column temperature was maintained at 25° C. UV-spectra were acquired at 254 and 285 nm.

[0337] The liquid chromatography system was coupled to a Compact micrOTOF-Q mass spectrometer (Bruker, Bremen, Germany) equipped with an electrospray ion source (ESI) operated in positive or negative ionisation mode. The ion spray voltage was maintained at 4500 V or 3900 V in positive or negative ionisation mode, respectively. Dry temperature was set to 200° C. and dry gas flow was set to 8 L/min. Nebulizing gas was set to 2.5 bar and collision energy to 15 eV. Nitrogen was used as a dry gas, nebulizing gas and collision gas. The m/z range was set to 50-3000. Samples were run in MS or AutoMSMS mode to acquire MS and MS/MS (MS2) spectra of all analytes present in extracts. All files were automatically calibrated by post processing to sodium formate clusters injected at the beginning of each run. The obtained mass spectra are shown in FIG. 9.

[0338] The loss from m/z 446.1807 to m/z 284.1281 is 162.0526. The calculated monoisotopic mass of a hexose-H₂O is C₆H₁₂O₆—H₂O=180.0628-18.0100=162.0528. Based on the knowledge of the expressed UGT it is known that the hexose is a glucose. The presence of fragmentation ions m/z 284.1281, 267.1014, 249.0908, and 221.0962 for parent ion m/z 446.1820 were shared with the known ions for Nororipavine as seen in the MS2 of m/z 284.1279.

[0339] In conclusion it was confirmed that the glycosylated nororipavine was in fact nororipavine with the addition of one glucose moiety.

### Structures and Masses of Nororipavine and Nororipavine-Glucoside

[chemical structure]

### B. Verification of the Glucosylation Position on Nororipavine.

[0341] The backbone of Nororipavine has a fragmentation pattern as published for Oripavine (Zhang et al 2008/Raith et al. 2003) and it is known that the amine group of oripavine often is lost creating a fragment of m/z 267 (as seen in FIG. 10). Should the glucose unit be linked through the nitrogen it would be lost before or together with the amine group, but as can be observed in FIG. 10 a fragment of m/z 429.1533 (corresponding to 267+162), this fragment shows the presence of an ion of the Nororipavine-glycoside that has lost the amine group as shown in the formula below. Therefore the glucosylation must occur at the hydroxyl position as shown. The fragment and the calculated monoisotopic mass of m/z 429.1543 also show a high mass accuracy.

[chemical structure]

### Example 12 Demonstration of Additional Combinations of Transporters and UGTs that are Functional for Production and Glucosylation of Nororipavine

[0342] As described above in Examples 4 and 5 strains containing PUP's were used and functions well with demethylases and UGTs for production and glucosylation of nororipavine. One of skill in the art would recognize that other PUP's can also serve the same function.

[0343] A tester strain was built to demonstrate various combinations of uptake transporters and UGTs on the glucosylation of oripavine and/or nororipavine during a bioconversion reaction.

[0344] Three episomal CEN/ARS plasmids containing the cytochrome P450 (SEQ ID NO: 258), the cytochrome P450 reductase SEQ ID NO: 260 or an uptake transporter each expressed under strong constitutive promoters were simultaneously transformed into the wildtype strain sOD157 containing a UGT. For example, the UGT SEQ ID NO: 93 was integrated on the genome under a strong constitutive promoter in one experiment shown in Error! Reference source not found.

The cells were grown as in Example 4 and the samples were extracted and analysed by HPLC as described in the materials and methods. As shown in Error! Reference source not found., numerous combinations of UGTs and transporters are functional in the bioconversion reaction of oripavine to nororipavine. High levels of nororipavine glucosylation were achieved, almost full nororipavine glucosylation. Use of transporters SEQ ID NO: 246, 244, 228, 248, 250, 230, 252, and 254 all produced more than 50% glucosylation, some more than 60%, some more than 80% and some even more than 90% in cells that were fed with 0.5 mM oripavine in DELFT media pH 5.5 and grown at 30° C. with shaking at 250 rpm for 72 h.

[0345] An additional UGT (SEQ ID NO: 170) with 62% identity at the protein level to SEQ ID NO: 96 was also tested in a similar manner as above. Briefly, cells were grown overnight in SC-HLU and used to inoculate Delft pH 5.5 media containing 2 mM oripavine. After growth with shaking at 30 degrees Celsius for 3 days, total extracts were obtained by mixing the cultures with an equal volume of 0.2% formic acid and heating at 80 degrees Celsius for 10 minutes. After centrifugation, the supernatant was diluted in 0.1% formic acid for quantification by HPLC as described in the Materials and Methods. UGT SEQ ID NO: 170 was active for glucosylation on both oripavine and nororipavine however it produced 41% of the noropavine-glu relative to SEQ ID NO: 96 and 35% of oripavine-glu relative to SEQ ID NO: 96.

### REFERENCES

[0346] P. v. Hoek, E. d. Hulster, J. P. v. Dijken, J. T. Pronk. Fermentative capacity in high-cell-density fed-batch cultures of baker's yeast, Biotechnol Bioeng 68: 517-523, 2000.
[0347] Gietz RD, Schiestl RH, Mortensen U H et al. Quick and easy yeast transformation using the LiAc/SS carrier DNA/PEG method. Nat Protoc 2007; 2:35-7.
[0348] AM Mulichak, et al, “Structure of the TDP-epi-vancosaminyltransferase GtfA from the chloroeremomycin biosynthetic pathway”, Proc Natl Acad Sci USA 2003 Aug. 5; 100(16):9238-43;
[0349] AM Mulichak et al, “Crystal structure of vancosaminyltransferase GtfD from the vancomycin biosynthetic pathway: interactions with acceptor and nucleotide ligands,” Biochemistry 2004 May 11; 43(18):5170-80.
[0350] Maury J, et al. EasyCloneMulti: A Set of Vectors for Simultaneous and Multiple Genomic Integrations in Saccharomyces cerevisiae. PLoS One 11(3):e0150394, March 2 (2016).
[0351] Mikkelsen, M D et al.; Metab. Eng.; 14, Issue 2, 104-111 (2012)
[0352] Osmani et al., 2009, Phytochemistry 70: 325-347
[0353] Sonnhammer et al., Nucl. Acids Res., 26:320-322 (1998).
[0354] Sonnhammer et al., Proteins, 28:405-420 (1997).
[0355] Bateman et al., Nucl. Acids Res., 27:260-262 (1999).
[0356] Mackenzie et al, “The UDP glycosyltransferase gene superfamily: recommended nomenclature update based on evolutionary divergence,” Pharmacogenetics, 1997 August; 7(4):255-69.
[0357] Gene Reports Volume 9, December 2017, Pages 46-53: Strategies of codon optimization for high-level heterologous protein expression in microbial expression systems.
[0358] Mumberg D, et al. (1995) Gene 156(1):119-22).
[0359] Zhang, Z., Yan, B., Liu, K., Bo, T., Liao, Y., and Liu, H. (2008), Fragmentation pathways of heroin-related alkaloids revealed by ion trap and quadrupole time-of-flight tandem mass spectrometry. Rapid
[0360] Commun. Mass Spectrom., 22: 2851-2862. https://doi.org/10.1002/rcm.3686
[0361] Raith, K., Neubert, R., Poeaknapo, C., Boettcher, C., Schmidt, J. (2003), Electrospray tandem mass spectrometric investigations of morphinans. Journal of the American Society for Mass Spectrometry, 14: 1262-1269. https://doi.org/10.1016/S1044-0305(3)00539-7

The application's sequence listing, which the Patent Office published only in electronic form, follows.

SEQUENCE LISTING (260 sequences)

SEQ ID NO: 1 - DNA, 1464 bp, Eucommia ulmoides
atggaagaaaccaccatgaccaataccaatcgtgttgaactggtttttattccgagtcctggtatgggtcatctggttagcgcagttgaaatggcaaaactgctggttgatcgtgatcagcgtctgagcattaccctgctgattatgaaagcaccgtttaaaaccaaagccaactatagtccggcacagagcctgagcaccgcagcagcaagccgtattcgttttgttgatctgcctggtgatgaactggaaagtgatgcaaaatttagtccgcatacctttctgagcggttttattagcggtcagaaaaccctggttcgtgatgcagttgcacagattagcagcagtccggaagcaccgcgtctggcaggcttttttatcgatatgttttgtaccagcatgatcgatgtggcagatgaatttcgtgttccgacctatgtgttttttaccagtggtgcagcatttctgggtttagtttttcatctgcagaccatgcgtgatgatcataatcatgatgttaccgagctgaaagatagtgatgccgatctgctggttccgtgttttgttaaaagcgttccgaccaaagttctgccgagcgttgttctggataaagaaggtggtagcgaaatgtttcatgatctggttcgtcgtattcgtgaaaccaaaggcattctgattaacacctttagcgaactggaatcccatgccattcatagcattaatacccctccggtttatccggttggtccgattctgaatgttgccggtgataatgataatgaaagtaccagcgcagcagccattctgaaatggctggatgatcagcctccgagcagcgttgtttttctgtgttttggtagcatgggttgctttggtgttgatcaggttaatgaaattgcacatgcactggaacgtagcggtcatcgttttctgtggtcactgcgtcgtccgcctccggaaggtaaactggaatttccgggtgattataccaatctggaagaagtgctgccggaacgtttcctggaacgcaccgcagaaattggtcgtgttattggttgggctccgcaggcagcagttctggcacatcgtgcagttggtggttttgttagccattgtggttggaatagcaccctggaaagcgtttggtatggtgttccgatggcagcatggcctcagtatgcagaacagcagctgaatgcatttctgatggttgaagaattagaaatggccgtcgagatcaaaatggattatcgcaatggcttctatagcaaaagcggtgttgcactgcgtagcgaagaaattgaaaaaggtattcgtcgtctgatggaatgcggtgaaaatggtatgcgtaaaaaagtggaagaaatgcgcgaaaaaagccgtgtggcagttcgtgaaggtggttcaagctatctgtctattggtcgcctgattgaagatgtgatgaaaatcgttgaacagtaa

SEQ ID NO: 2 - DNA, 1431 bp, Panax ginseng
atgggtgcagaactgattctgattccgagtcctggtgttggtcatctggttagcaccgttgaaattgcaaaactgctgattagccgtgatgaacgtctgagcattaccgttctggttatgaaattttcacatgataccggtgttaccgcatatacccgtagcctgcagaaagatgcaccgaatcgtattgtttttgttgatctgccgcagaacgaaagcctgattagcagcccgaaaagtttttttaccagctttattgaaagccagaccagtccggttcgtgatagcgttcgtcagattgttagccgtagcgatagcaataaactggcaggttttgtgatcgatatgttttgtaccccgatgattgatgtggccaatgaatttggtgttccgacctatgtgttttttacctcaggtgcagcatttctgggtctgcagttttatcatctgagcctgagtgatgaacataatcaggatctgaccgagtataaagataccgatgttgaactgagcattccgagctttattaacccggttccggcaaaagttctgccgagcgttattctgaataaagaaggtagcaccatgctgcagagcattagccgtcgttttaaagaagcaaaagccattctggttaacacctttgccgaactggaaccgcatgcaattaaagcactgggtgataactgtaaaatccctccgatttatccggttggtccgattattaacctgaaaaacaaagaaggcaccacgcagaatcatagcagcgaagatggtattattagctggctggataatcagcctccgagcagcgttgtttttctgtgttttggtagctttggcagctttgatgaaggtcaggttcgtgaaattgccaatggtctggaacagagcggtcagcgttttctgtggtcactgcgtcgtcgtccggaaaaaatggaactgccgaaagattatgaaaacccggaagaagtgctgccggaaggttttattgaacgtaccagcggtatgggtaaagttattggttgggcaccgcagaccgcaattctgagccatccggcagttggtggttttgttagccattgtggttggaatagcaccctggaaagcatttggtgtggtgtgccgatggcaacctggccgatttatgcagaacagcagattaatgcatttgaactggtgaaagaattaggcatggcggtggaaatcaaaatggattatcgtgaggattatatctttgcaccggaaaataatctggttgtgaccgcagatcagattgaaaaaggtatgcgttgtctgatgatggatggtgaaagcgaaatgcgcaaaaaagtcgaagaaatgaaagaaaaaagccgtatggccatggttaaaggtggtagcagctatattagcctgggtcatttcattgaagatgtgatgcgcaactaa

SEQ ID NO: 3 - DNA, 1422 bp, Carthamus tinctorius
atgaccaatagcgaactggtgtttattccgagtcctggtgcaggtcatctgcctccgaccgttgaactggcaaaactgctgctgcgtcgtcatcatcgtctgagcattaccattattatcatgaaagcaccgtttggtggtggtgcatatgataccgcaaaactggatagcacaccgcgtctgcgttgtgttgaaattccgagtgatgatagcaccgcagcactgattagcccgaccgcatttctgaccgcctttattgatcatcataaaccgcatgtgcgtaacattgttcgtgaaagcattgcagatcctggtggcaccgttcgtctggcaggttttgttgttgatatgttttgcgttgatatggtggatgtggccaatgaatttggtgcaccgacctatgcatattttaccagcggtgcagcaatgctgggtctgatgtttcatctgcaggcaaaacgtgatgatgataatctggatgttaccgagctggataaaaacagccgtagcgttattagcgttccgagctatattaacccggttccggttaatgttctgctggatgttctgtttgataaaaacggtgcgaaaatgtttctggatctggccaaacgttttcgtgaaaccaaaggcattattgtgaatagctttcgtgaactggaaagccatgcaattgaagttctgtcagatgatccggatattccgcctgtttttccggttggtccgattctgaatctgaatagcaccaccgatgatggtaaagtggatgatattatgacctggctggatgaacagccggaacgtagcgttgtttttctgtgttttggtagcatgggcacctttccggaagaacaaattcgtgaaattgcaagcgcaattgaaagcggtggtcatcgttttctgtggtcactgcgtcgccctagcagcaaagaaaaaatggaaagcccgaaagaatatgaggatccgggtgaagtgctgccggaaggttttctggaacgtaccagtggtgttggtcgtgttattggttgggctccgcagctgatggttctgagccatcgtagcgtgggtagctttgttagccattgtggttggaatagtaccctggaaagcatttggtgtggtgttccgattgcagcatggccgatgtatgcagaacagcagaccaatgcatttcagctggttagcgaagcaggtattgcagccgaagttcgtatggattatcgtaccaatatgaaacctggtggtgagcagatgattgttacagccgaagaaattgaacgtggtattcgtcgtgtgatgagtgatggtgaaattaaacgtaaagccgaagagatgaaagagaaaagccgtctggccgtgagcgaaggtggtagcagctatgatagcattggtgattttatccaccacgtgatgaacgaataa

SEQ ID NO: 4 - DNA, 1440 bp, Camellia fraterna
atgagcaaagcacagctggtttttattccgagtcctggtattggtcatattgttagcaccgttgaaatggcaaaactgctggttggtcgtgatgatcgtctgagcattaccgttctggttatgaaatttccgttcgataataaaggcaccagctatacccagagcctgagcagcgatcgtattcgttttctggacctgtttcatgataccccgagcaccgcagatccgaatagcaaaatctttggtagcttcctgttcgattatatcgaaagccataaaccgcgtgttcgtgatgttgttagcgaaaccgttagcaaaagcgaaagcgaatcaacaccgcgtctggcaggttttgttattgatatgttttgtaccccgatgatcgatgtggcaaatgaatttggtgttccgacctatgtgttttttaccagcagcgcagcatttctgggtctgatgtttcatattgataccctgcagcaggatattaccgaactggaagattcagatgcagaactgaatgttccggcatatgcaaatccggttccggctaaatttctgccgagcgttctgtttgataaagaaggtggtagcatgtttctgaacattgcaaaacgttggcgtgaaaccaaaggcattattgtgaatacctttaccgagcttgaattccgtgcactgaaaagcctgcaagaagatcataccaatccgcagatgtatccggttggtccggtgctgaatctgaaaggtggttcaccgaatgaagcacagaatagccagagcgaagcagatattatgcgttggctggatgaacaggatccgagcagcgttgtttttctgtgttttggtagccgtggtagctttgatggtgatcaggttaaagaaattgcacatagcctggaaagcagcggtcatcggtttctgtggtcactgcgtcagcctccgcctaaaggtaaaattggtctgccggaagaatatgaaaacctgaccgatattctgcctgaaggctttctggatcgtaccgcagaaattggtaaagttattggttgggcaccgcaggttgcagttctgagccatcgtgcagttggtggttttgtgagccattgtggttggaatagcaccctggaaagtctgtggtgcggtgttccggttgccacctggccgatgtatgcagaacagcagatgaatgcatttcagctggttcgcgaatttggtatggcagttgaaatcaaaatggattaccgcaacgactatctgatgaaaaaaatgccggttatggttaccgcagatgaaattagcagcggtattcgtcagctgatggatggtagcgacgaaattaaacacaaagtgaaaaagatcagcgagaaaagccgtgttgcagttatggaaggtggcagcagctataatagcctgggttgttttattgaagatgtgatccagggctaa

SEQ ID NO: 5 - DNA, 1410 bp, Forsythia x intermedia
atggccgaaaccaaaaaaagcgaactggtttttattccggttcctggtgttggtcatctgattagcaccattgaaatggcagaactgctgaccgatcgtgatgaacgtctgagcattaccgtgattattatgaaactgccgatggaaagcaaaaccgatttctatagccgtaaaagcaatagccgcattcgctttattgaatttagcctgaatcagccgattacgccgaataactttgtgacccattttatcgaaagccacaaagatccgattcgtgatgcagttaccaaaattgtgcgtgatgaaagcaattcaattcgcctggcaggttttgtgattgatatgttttgtaccaccatgatcgatgtggccaatgaatttggtgttccgacctatgtgttttttaccacaaccgcagcactgctgggttttaccttttatctgcagagccgtagtgatgaacagaaactggatgttaccgagtacaaaaatagcaatgcagagctgctgattccgacatatatcaatccggttccggcaaatgtttttccgagccgtttttttgataaagatggtctggcaatgtttttaggtatggcacgtcgttttcgtgaaaccaaaggcattatgattaacacctttctggatctggaagcccatgcaatgaaaagcctgagtgatgatcataccattccgcctgtttatagcattggtccgattattcatgtgaccgcagaaaacgatgatgacaacaaagattatgacgaaatcatcaaatggctgcatgaacagccggttagcagcgttgtttttctgtgttttggttccatgggcttttttgatgatgagcaggttaaagaaattgccgttgcactggaaaaaagtggtcaccgctttctgtggtcactgcgtaaaccgcctccgaaagatcgttttgaatatccgagcgattatgagaacctggaagaaattctgccggaaggttttctgcagcgtaccgcaggtattggtaaagttattggttgggcaccgcaggttgcagttctgagccatcattcagttggtggttttgttagccattgtggttggaatagcaccctggaaagcgtttggtgtggtgtgccgattgcagcatggccgatgtatgcagaacagcagaccaatgcatttgaactggttaaagatctgggtattgccgtggaaatcaagatggattatcgtcgtggtagtgatgttattgtgaaagccgaagaaatcgaaaaaggtattcgccatctgatggaacctgatagcgaaatgcgcaataaaatgaagcagatgaaaaacaaaagccgtctggcactgatggaaggtggtagcagctatgattttctgcgtcatttcattgataacatcccgatgaccgattaa

SEQ ID NO: 6 - DNA, 1425 bp, Tanacetum cinerariifolium
atgaaaaccagcgaactggtttttgttccgagtcctggtgcaggtcatctgcctccgaccgttgaactggcaaaactgctgctggatcgtgatgatcatttaagcattaccatcatcatcatgaaactgtacatgggtgccaaacatgataccggtacaccgattagcaccgatcgtctgcgttatattgatattccgtgtgatgaaagcaccatggcactgattacaccggaaacctttctggcaacctttgtggaatacaataaaacccatgtgcgtaatattgtgcgcgaaaacattattgaaagcaatagcgttcgtctggcagcatttgttctggataccttttgtatgggtatggcagatgttgccaatgaatttggtgttccgacctataactattttaccagcggtgcaagcatgctgggtctgatgtttgatctgcaggcaaaacgtgatgaagagggtcatgatgttaccgaactgaaagatagcggtctggaactgagcattccgagctttgttaatccggttccggcaaaagttctgcctgaagttgtgctggataataaaggtcgtgcaaaaatgtttctggatctggccaaacgttttcgtgaaaccaaaggcattatcatcaacagctttcaagaactggaaagccatggtgttgaatatctgctgagcagcaatgcaaatattccgcctgtttttccggttggtccgattctgaatctgagcaaagcaaaaaatgatagcaagaccgaagaaatcatgacctggctgaatgatcagccggaaagcagcgttgtttttctgtgttttggtagcatgggcagctttaatgagaaacaggttaaagaaattgcgattgcactggaacgtagcggtcatcgttttctgtggtcactgcgtcgtccgcagccgaaaggtaaaatggaacatccgaaagaatatgagaatccggaagaagtgctgccggaaggctttattgaacgtaccagcagcgtgggtaaagttattggttgggcaccgcagaccgcagttctgagccatccgagcgttggtggttttgttagccattgtggttggaatagcaccctggaaagcatttggtgtggtgtgccgattgcagcatggcctctgtatgcagaacagcagattaatgcatttcagctggttgtggaactgggtattgcagcagaaattcgtatggattatcgtagcgatatgcgtcgcggtattaacaatatgaccgttgccgcagaagaaattgaagaaggtattcgtcgtctgatgaacgatcatgaaatgcgcaacaaagtgaaagagatgaaagaaaaatcacgtgcagcagttgttgaaggtggtagcagctatgcaagcattggcaaattcatcgaacatgttagcaacgtgaccatttaa

SEQ ID NO: 7 - DNA, 1422 bp, Tanacetum cinerariifolium
atgaaaaccagcgaactggtgtttattccgagtcctggtgcaggtcatctgcctccgaccgttgaactggcaaaactgctgctggatcgtgatgatcagctgagcgttaccattattatcatgcagctgtttgttggtgccaaacatgataccggtacaccggttagcaccgatcgtctgcgttatattgatattccgtgtgatgaaagcaccatggcactgattacaccggaaacctttctgtttacctttgtggaacagaacaaaacccatgtgcgtaatattgtgcgcgaaaatgttattgaaagcaatagcgttcgtctggcagcatttgttctggatatgttttgtatgggtatggtggatgtggccaatgaatttggtgttccgacctataactattttaccagcagcgcaagcatgctgggtctgatgtttgatctgcaggcaaaacgtgatgaagagggtcatgatgttaccgaactgaaagatagcggtctggaactgagcattcagagctttgttaatccggttccggcaaaagttctgcctggtgttgtgctggataataaaggtggtgcaaaaatgtttctggatctggccaaacgttttcgtgaaaccaaaggcattatcatcaacagctttcaagaactggaaagccatggtgttgaatatctgctgcgtcgtaatgcaaatattccgcctgtttttccggttggtccgattctgaatctgagcaaaccgaaaattaacgacagcaaaaccgaagagatcatgatgtggctgaatgatcagccggaaagcagcgttgtttttctgtgttttggtagcatgggcagctttaatgagaaacaggttatggaaattgccattgcactggaacgtagcggtcatcgttttctgtggtcactgcgtcgtccgcagccgaaaggtaaaatggaacatccgaaagaatatgagaatccggaagaagtgctgccgcagggttttattgaacgtaccagcagtgttggtaaagttattggttgggcaccgcagaccgcagttctgagccatccgagcgttggtggttttgttagccattgtggttggaatagcaccctggaaagcatttggtgtggtgtgccgattgcagcatggcctctgtatgcagaacagcagattaatgcatttcagctggtgatggaactgggtattgcagcagaaattcgtatggattatcgtggtgatatgcgtcgcggtattaacaatatgaccgttgcagccgaagaaattgaagatggtattcgtcgtctgatgaacgatcatgaaatgcgcaataaagtgaagcagataaaagagaaaagccgttttgcagttctggaaggtggtagcagctatgcatatattggtcgctttattcatcacctgaacagcatctaa

SEQ ID NO: 8 - DNA, 1518 bp, Nyssa sinensis
atgaaagaaaccgagatggtgtttattccgagtcctggtattggtcatctgattgcaaccgttgaactggttaaactgctgattaatcgtgatgaacgtctgagcattaccgtgctgattatgaaactgccggatgatagcaccccgaccagcagcgcaagcgcatatggtagcgataccagccgtattcgttttgttcatctgccgacacgtaccccgacacaggttgatagcgaaccgcctaaaagcctgcgtcattttctgtttgattttatcgatagccacaaaacccatgttcgtgatgttgttgcagatattacccgtagccatagcgttcgtctggcaggcgtttttattgatatgttttgtaccccgatgatcgatgtggcaaatgaatttggtgttccgagctttgtgttttttaccagcggtgcagcatttctgggtctgatgtttcatctgcagagcctgcaggatcatcagaatcaggatattaccgaatttcatgattcagatgcagaactgctggttccgacctttaccaatccggttccggcaaaactgctgccgagcgttgttctggataaaggtggtagctgtaccctgtttctggcaattgcacgtaaatttcgtgaaaccaaaggcattctggttaacacctttgccgaactggaaagccatgcaattaaaagctttagcaccctgagcagtgatggcgacgataatattccgcctatttatccggttggtccgattctgaacattaaagaaggtggcggaggcggagaagttacccataataatcaagaacagtatgacgccattatgagctggctggatgatcagcctccgagcagcgttgtttttctgtgttttggtagcaaaggttgctttggtgataaccaggttaaagaaattgcacatgccctggaaagcagcggtcatcgttttctgtggtcactgcgtcgtccgccaccgaaaggtagcgttgatctgccgcatgattatagcaatccggaagatgttctgccggaaggttttctggaacgtaccgttggcaaaggtatgggtaaagttattggttgggcaccgcaggcagccgttctgagccatcctgcagttggtggttttgttagccattgtggttggaatagtaccctggaatctatttggtgcggtgttccggttgccacctggcctctgtatgcagaacagcagatgaatgcatttgagctggttcgtgaactgggtttagcagttgaactgaaactggattatcgccgtgatttcttttggagtagtgatgaagttggtctgctgaccgcagaagaaattgaaagcggtattcgtcaggttatgatggatggtgaaattcgcaaaaaggtcaaagaaatgaaagagaaaagtcgcgttgcaatgatggaaggtggttcaagctatgttagcctgggtcgtatgattgaagatctgatccatgatgcaccgcagaatattcagacaccgcctccgggtctgtaa

SEQ ID NO: 9 - DNA, 1422 bp, Mikania micrantha
atgctgattagcgaactggtgtttattccgagtcctggtgcaggtcatctgcctccgacactggaactggcaaaactgctgctgcagcgtgatcagcgtctgagcgcaaccattattatcatgaatgttagctttggtccgaaacagaataccgaaacacgtccgagcgatccgcgtctgcgtattattgatattccgtgtgatgatagcaccatggcactgattagcccgaaaacctttctgaccgattttatcgaacatcataaaccgcatgtgcgtgatattgtgcagggcattattgaaagccatagcgttcgtctggcaggttttgttctggatatgttttgtaccgcaatgaccgatgttgcacgtgaatttggtgcaccgacctatacctattttaccagcggtgcagcaaccctgggtctgatgttttatttccagagcaaacgtgatcatgaaggttatgatgcaaccgaactgaaaaataccgaatcagaactgagcgttccgagcattgttaatccggttccggcaaaagttctgccggatgttctgctggataaagaaggtggtagcaaaatgtttctggatctggcagaaatgtatcgcaaaagcaaaggcattatcgtgaacagctttcaagaactggaaacccatggtgttgaatatctgctgggtgatgataatgatattcctccggtttttgcagttggtccgattgtgaatctggaaaacaaaaaagacgaaaccaaaaccgatgaaattatgcgctggctgaatgaacagccggaaagcagcgttgtttttctgtgttttggtagcatgggcagctttaatgaaaaacaggttaaagaaattgccgtggccattgaacgtagcggtcatcgttttctgtggtcactgcgtcgtcgtccggcaagcaaagaaaaagtggaatatccgaaagagtacgagaacctggaagaagtgctgccggaaggttttctggaacgtaccagcagcctgggtaaagttattggttgggcaccgcagctggcagttctgagccatccgagcgttggtggttttgttagccattgtggttggaatagcaccctggaaagcatttgttggtgtggtgttccgatggcagcatggcctctgtatgcagaacagcagctgaatgcatttctgctggttgttgaacatggtctggcagttgaaattcgtatggattatcgtacagatccgcgtgccggtgttggtgaaggcatgatggttacagccgaagaaattgaagatggtattcgcaaactgatgtccgatgatgaactgcgcaaaaaagttaaacacatgcgtgaaaaaagccgtgcagcaatgattgaaggtggttcagcatataccagcattggcaactttattcatgatctgaccatttaa

SEQ ID NO: 10 - DNA, 1422 bp, Artificial
  Artificial sequence
atgctgatctccgagttggttttcattccatctccaggtgctggtcatttgccaccaactttggaattggctaagttgttgttgcaaagggaccaaagattgtctgccaccattattatcatgaacgtttcttttggtcccaagcaaaacactgaaactagaccatctgatccaagattgagaatcatcgatatcccatgtgatgattctaccatggctttgatttctccaaagactttcttgaccgatttcatcgaacatcataagccacacgttagagatatcgttcaaggtatcatcgaatctcactctgttagattggctggtttcgttttggatatgttctgtactgctatgaccgatgttgctagagaatttggtgctccaacttacacttactttacatctggtgctgctactttgggtttgatgttttactttcaatccaagagggatcacgaaggttatgatgctactgaattgaagaacaccgaatccgaattgtctgttccatctatcgttaatccagttccagctaaagttttgccagatgtcttgttggacaaagaaggtggttctaagatgttcttggatttggctgaaatgtacagaaagtccaagggtattatcgtcaactccttccaagaattggaaacccatggtgttgaatacttgttgggtgatgataacgatatccctccagtttttgctgttggtccaatagttaacttggagaacaaaaaggacgaaactaagaccgacgaaatcatgagatggttgaatgaacaaccagaatcctccgttgttttcttgtgttttggttctatgggttccttcaacgaaaagcaggtaaaagaaattgccgttgccattgaaagatccggtcatagatttttgtggtccttgagaagaaggccagcttctaaagaaaaagtcgaatacccaaaagagtacgagaacttggaagaagttttaccagaaggtttcttggaaaggacatcctctttgggtaaagttattggttgggctccacaattggctgttttgtctcatccatctgttggtggttttgtttctcattgtggttggaactctaccttggaatctatttgttggtgtggtgttccaatggctgcttggccattatatgctgaacaacaattgaacgccttcttgttggttgttgaacatggtttggctgtcgaaatcagaatggattatagaacagatccaagagctggtgttggtgaaggtatgatggttactgctgaagaaattgaggatggcatcagaaagttgatgtccgatgatgagttgcgtaaaaaggttaagcacatgagagaaaagtctagagctgctatgattgaaggtggtagtgcttatacttccatcggtaacttcattcacgacttgaccatttga

SEQ ID NO: 11 - DNA, 1428 bp, Mikania micrantha
atgctgaccagcgaactgatttttatcccgagtcctggtgcaggtcatctgcctccgacactggaactggcaaaactgctgctgcagcgtgatcagcgtctgagcgcaaccattattatgatgaatattagcttcggtgccaaaaacagcaccgaaacacgtccgtgtaatccgcgtctgcgttttattgatattccgtgtgatgatagcaccatggcactgatgaccccgaaaagctttctgtttagctttatccagcatcataaaccgcatgtgcgtgatattgttcgcggtattattgaaagcaatagcgttcgtctggttggttttgttctggatatgttttgtaccgcaatgaccgatgttgccaatgaatttggtgcaccgacctatacctattttaccagcggtgcaaccacactgggtctgatgctgtatctgcaggcacgtctggatcatgaaggttatgatattattggcctgaaaaacagcgaaagcaaactgtgtgcaccgagctttattaacccggttccggcaaaagttctgccgaaaagcctgtttgataaagaaggtggtagcaaagaatttctgcgtctgatgggtcgttttcgtgaaagcaaaggcattattgttaatagctgcctggaattagaaacccatggtgttgaatatctgctgcgcaaagataatgatattcctccggtttttgcagttggtccgattgttaatctggaaaacaaaaaagacgacaccaagaacgatgaaattatgcgttggctgaatgaacagccggaaagcagcgttgtttttctgtgttttggtagcatgggcagctttaacgaaaaacaggttaaagaaattgccgtggcaattgaacgtagcggtcatcgttttctgtggtcactgcgtcgtccggcaagcaaagaaaaagtggaatatccgaaagaatatgaaaacgtggaagaagtgctgccggaaggttttctggaacgtaccagcagctttggtaaagttattggttgggcaccgcagattgcagttctgagccatccgagcgttggtggttttgtgagccattgtggttggaatagcaccctggaaagcatttgttggtgtggtgttccgatggcagcatggcctctgtatgcagaacagcagctgaatgcatttctgctggttgttgaattaggtatggcagtggaaattcgcatggattatcagaccgaagcacgtaccggtgttagtgatggtatgatggttaccgcaaaagaaatcgaagatggtattcgcaaactgatgagtgatggtgaactgcgcaaaaaagtgaaggacatgaaagaaaaaagccgtgccagcattgttgaaggtggttcagcacataccagcattggtaatctgattaacgatctgatgaacgtgaccatttaa

SEQ ID NO: 12 - DNA, 1428 bp, Artificial
  Artificial sequence
atgctgacctccgaattgatcttcattccatctccaggtgctggtcatttgccaccaactttggaattggctaagttgttgttgcaaagggaccaaagattgtccgctaccattattatgatgaacatttccttcggtgccaagaactctactgaaactagaccatgtaatccaaggttgagattcatcgatatcccatgtgatgattctaccatggctttgatgactccaaagtctttcttgttctccttcatccaacatcataagccacacgttagagatatcgttagaggtatcatcgaatccaactccgttagattggttggtttcgttttggatatgttctgtactgctatgaccgatgttgctaatgaatttggtgctccaacttacacttactttacatctggtgctactaccttgggtttgatgttgtacttgcaagctagattggatcacgaaggttacgatattatcggcttgaagaactccgaatctaaattgtgtgctccctcattcattaacccagttccagctaaagttttgcccaagtctttgtttgacaaagaaggtggctccaaagaattcctaagattgatgggtagattcagggaatccaagggtattatcgttaactcttgtttggagttggaaacccatggtgttgaatacttgttgagaaaggataacgatattccaccagtttttgctgttggtccaatcgtcaatttggaaaacaaaaaggatgacaccaagaacgacgaaatcatgagatggttgaatgaacagccagaatcctctgttgttttcttgtgttttggttccatgggttccttcaacgaaaagcaagtaaaagaaattgccgtcgccattgaaagatctggtcatagatttttgtggtccttgagaaggccagcttctaaagaaaaagtcgagtacccaaaagaatacgagaacgttgaagaagtattgccagaaggtttcttggaaagaacttcttcattcggtaaggttattggttgggctccacaaattgctgttttgtctcatccatctgttggtggttttgtttctcattgtggttggaattctaccttggaatctatttgttggtgtggtgttccaatggctgcttggccattatacgctgaacaacaattgaacgcttttttgttggtcgtcgaattaggtatggccgttgaaattagaatggactaccaaactgaagctagaaccggtgtttctgatggtatgatggttaccgctaaagaaatcgaagatggcatcagaaagttgatgtctgatggtgagttgcgtaaaaaggttaaggacatgaaggaaaagtccagagcttctatagttgaaggtggttctgctcatacttccattggtaacttgatcaacgatttgatgaacgtcaccatctaa

SEQ ID NO: 13 - DNA, 1428 bp, Mikania micrantha
atgctgaccagcgaactggtttttattccgagtcctggtgcaggtcatctgcctccgacactggaactggcaaaactgctgctgcagcgtgatcagcgtattagcgcaaccattattatcatgaatgttagctttggtgccaaacagaataccgaaacacgtccgagcaatccgcgtctgcgtattattgatattccgtgtgatgatagcaccatggcactgattccgcctaaaacctttctgaccgattttatccagcatcataaaccgcatattcgcgatattgtgcgtggcattattgaaagcaatagcgttcgtctggcaggttttgttctggatatgttttgtatggcaatgaccgatgttgcaagcgaatttggtgcaccgacctatacctattttaccagcggtgcagcaaccctgggtctgatgctgtatctgcaggcacgtctggatcatgaaggttatgatattattggcctgaaaaacagcgaaagcaaagttcatgcaccgagctttgttaatccggttccggcaaaagttctgccgaaaagcctgtttgataaagaaggtggtagccgcaaatttctgaaactgatgggtcgttttcgtgagagcaaaggtattattgttaatagctgcctggaacttgaaacccatgcagttgaatatctgctgagcaaagataatgatatccctccggtttttgcaattggtccgattgttaatctggaaaacaaaaaggacgacaccaagaacgaagaaattgttcgttggctgaatgaacagccggaaggtagcgttgtttttctgtgttttggtagcatgggcagctttaacgaaaaacaggttaaagaaattgccgtggcaattgaacgtagcggtcatcgttttctgtggtcactgcgtcgtccgacaccgaaagaaaccgtggaatatccgaaagaatatgagaatgttgaagaagtgctgccggaaggctttctggaacgtaccagcagctttggtaaagttattggttgggcaccgcagattgcagttctgagccatccgagcgttggtggttttgttagccattgtggttggaatagcaccctggaaagcatttgttggtgtggtgttccgatggcagcatggcctctgtatgcagaacagcagctgaatgcatttctgctggttgttgaattaggtatggcagtggaaattcgcatggattatcagaccgaagcacgtaccggtgttagtgatggtatgatggttaccgcaaaagaaatcgaagatggtattcgcaaactgatgagtgatggtgaactgcgcaaaaaagtgaaggacatgaaagaaaaaagccgtgcagcaattgttgaaggtggttcagcacataccagcattggtaatctgattgataacctgatggatgtgaccatttaa

SEQ ID NO: 14 - DNA, 1428 bp, Artificial
  Artificial sequence
atgctgacctccgaattggttttcattccatctccaggtgctggtcatttgccaccaactttggaattggctaagttgttgttgcaaagggaccaaagaatttccgccaccattattatcatgaacgtttcttttggtgccaagcaaaacactgaaactagaccatctaatccaaggttgagaatcatcgatatcccatgtgatgattctaccatggctttgattccaccaaagactttcttgaccgatttcatccaacatcataagccacacatcagagatatcgttagaggtatcatcgaatccaactctgttagattggctggtttcgttttggatatgttctgtatggctatgaccgatgttgcttctgaatttggtgctccaacttacacttactttacatctggtgctgctactttgggtttgatgttgtacttgcaagctagattggatcacgaaggttacgatattatcggcttgaagaactccgaatctaaagttcatgctccatctttcgttaatccagttccagctaaagttttgcccaagtctttgtttgacaaagaaggtggttctcgtaagttcttgaaattgatgggtagattcagggaatccaagggtattatcgttaactcttgtttggagttggaaacccatgctgttgaatacttgttgtccaaggataacgatattccaccagtttttgctatcggtccaatcgtcaatttggaaaacaaaaaggatgacaccaagaacgaagaaatcgtcagatggttgaatgaacaaccagaaggttctgttgttttcttgtgttttggttccatgggttccttcaacgaaaagcaagtaaaagaaattgccgtcgccattgaaagatctggtcatagatttttgtggtccttgagaaggccaactcctaaagaaacagttgagtacccaaaagaatacgagaacgttgaagaagtattgccagagggttttttggaaagaacttcttcattcggtaaggttattggttgggctccacaaattgctgttttgtctcatccatctgttggtggttttgtttctcattgtggttggaactctaccttggaatctatttgttggtgtggtgttccaatggctgcttggccattatatgctgaacaacaattgaacgccttcttgttggttgtcgaattaggtatggctgtcgaaatcagaatggattaccaaactgaagctagaaccggtgtttctgatggtatgatggttaccgctaaagaaatcgaggatggtatcagaaagttgatgtctgatggtgagttgcgtaaaaaggttaaggacatgaaggaaaagtctagagctgctatagttgaaggtggtagtgctcatacttctatcggtaacttgattgacaacttgatggatgtcaccatctaa

SEQ ID NO: 15 - DNA, 1428 bp, Mikania micrantha
atgctgaccagcgaactgatttttatcccgagtcctggtgcaggtcatctgcctccgacactggaactggcaaaactgctgctgcagcgtgatcagcgtctgagcgcaaccattattatgatgaatattagcttcggtgccaaaaacagcaccgaaacacgtccgtgtaatccgcgtctgcgttttattgatattccgtgtgatgatagcaccatggcactggttaccccgaaaagctttctgtttagctttatccagcatcataaaccgcatgtgcgtgatattgttcgcggtattattgaaagcaatagcgttcgtctggttggttttgttctggatatgttttgtaccgcaatgaccgatgttgccaatgaatttggtgcaccgacctatacctattttaccagcggtgcaaccacactgggtctgatgctgtatctgcaggcacgtctggatcatgaaggttatgatattattggcctgaaaaacagcgaaagcaaactgtgtgcaccgagctttattaacccggttccggcaaaagttctgccgaaaagcctgtttgataaagaaggtggtagcaaagaatttctgcgtctgatgggtcgttttcgtgaaagcaaaggcattattgttaatagctgcctggaattagaaacccatggtgttgaatatctgctgcgcaaagataatgatattcctccggtttttgcagttggtccgattgttaatctggaaaacaaaaaagacgacaccaagaacgatgaaattatgcgttggctgaatgaacagccggaaagcagcgttgtttttctgtgttttggtagcatgggcagctttaacgaaaaacaggttaaagaaattgccgtggcaattgaacgtagcggtcatcgttttctgtggtcactgcgtcgtccgacaccgaaagaaaccatggaatatccgaaagaatatgaaaacgtggaagaagtgctgccggaaggttttctggaacgtaccagcagctttggtaaagttattggttgggcaccgcagattgcagttctgagccatccgagcgttggtggttttgtgagccattgtggttggaatagcaccctggaaagcatttgttggtgtggtgttccgatggcagcatggcctctgtatgcagaacagcagctgaatgcatttctgctggttgttgaattaggtatggcagtggaaattcgcatggattatcagaccgaagcacgtaccggtgttagtgatggtatgatggttaccgcaaaagaaatcgaagatggtattcgcaaactgatgagtgatggtgaactgcgcaaaaaagtgaaggacatgaaagaaaaaagccgtgccagcattgttgaaggtggttcagcacataccagcattggtaatctgattaacgatctgatgaacgtgaccatttaa

SEQ ID NO: 16 - DNA, 1428 bp, Artificial
  Artificial sequence
atgctgacctccgaattgatcttcattccatctccaggtgctggtcatttgccaccaactttggaattggctaagttgttgttgcaaagggaccaaagattgtccgctaccattattatgatgaacatttccttcggtgccaagaactctactgaaactagaccatgtaatccaaggttgagattcatcgatatcccatgtgatgattctaccatggctttggttactccaaagtctttcttgttctccttcatccaacatcataagccacacgttagagatatcgttagaggtatcatcgaatccaactccgttagattggttggtttcgttttggatatgttctgtactgctatgaccgatgttgctaatgaatttggtgctccaacttacacttactttacatctggtgctactaccttgggtttgatgttgtacttgcaagctagattggatcacgaaggttacgatattatcggcttgaagaactccgaatctaaattgtgtgctccctcattcattaacccagttccagctaaagttttgcccaagtctttgtttgacaaagaaggtggctccaaagaattcctaagattgatgggtagattcagggaatccaagggtattatcgttaactcttgtttggagttggaaacccatggtgttgaatacttgttgagaaaggataacgatattccaccagtttttgctgttggtccaatcgtcaatttggaaaacaaaaaggatgacaccaagaacgacgaaatcatgagatggttgaatgaacagccagaatcctctgttgttttcttgtgttttggttccatgggttccttcaacgaaaagcaagtaaaagaaattgccgtcgccattgaaagatctggtcatagatttttgtggtccttgagaaggccaacaccaaaagaaactatggaatacccaaaagagtacgagaacgttgaagaagttttaccagaaggtttcttggaaaggacttcttcattcggtaaagttattggttgggctccacaaattgctgttttgtctcatccatctgttggtggttttgtttctcattgtggttggaattctaccttggaatctatttgttggtgtggtgttccaatggctgcttggccattatacgctgaacaacaattgaacgcttttttgttggtcgtcgaattaggtatggccgttgaaattagaatggactaccaaactgaagctagaaccggtgtttctgatggtatgatggttaccgctaaagaaatcgaagatggcatcagaaagttgatgtctgatggtgagttgcgtaaaaaggttaaggacatgaaggaaaagtccagagcttctatagttgaaggtggttctgctcatacttccattggtaacttgatcaacgatttgatgaacgtcaccatctaa

SEQ ID NO: 17 - DNA, 1425 bp, Artemisia annua
atgaccacactggaactggtttttattccgagtcctggtgcaggtcatctgcctccgaccgttgaactggcaaaactgctgctggatcacgatcagcgtctgagcgttaccattattatcatgaatctgccgtttgaagccgaacaggttaccgaaacaccgattagcacaccgcgtctgaattttatctatgtggcaaatgaagatagcagcaaggatctgattagtccgcatacctttatgagcgcatttctggaacatcagaaaccgaaactgaaaaacattatccgcgatatcaccgaaagcgatagcgttcgtctggttggttttattgttgacatgttttgcattgccatgatcgatgttgccaatgaatttggtgttccgacctatgtgtattttaccagcagcgcaagcgcactgggtctgatgtttcatctgcaggcaaaatgtgatgatgaagagtatgatgtgaccgatctgaaagatagcgatctgatgctgagcattccgagctatgttaaaccgattcctgcaaaactgttaccgagcgttctgtttgataaacaaggtggcagcaaaatgtttatcgatctggccaaaaaattccgcgaaagcgaaggcattatcatcaacagctttcaagaactggaaagccatggtctggaatttctgattaaaggcgatccgaatattccgcctgtttttccggttggtccgattctgaatctgaaaaataccaaaaacgatggcaaaaccaccgatattatggcatggctggataatcagccgaaaagcagcgttgtttttctgtgttttggtagcatgggtagctttggtgagaaacaggttaaagaaattgcagttgcactggaacgtagcgaacatcgttttctgtggtcactgcgtcgtccgcctagcaaagaagttatgcgtctgccggaagaatatgagaactttaaagaagttctgcccgaaggttttctggaatgtaccagcaatctgggtaaagttattggttgggcaccgcagaccagcgttctgagccatccgagcttaggtggctttgttagccattgtggttggaatagcaccctggaaagcatttggtttggtgtgccggttgcagcatggcctctgtatgcagaacagcagattaatgcatttcagctggttatggaactgggtattgcagccgaaatcaaaatcgattacaaaagcaatattggtcctggtggtggtagcaatgaaatgctggttaaagccgatgaaattgaaagcggtattcgtcgtctgatgaacgatgatgatatgcgtcgtaatgtgaaagaaatgaaacacatgagccgtctgaccgtgaccgaaggtggtagctcatatgcaagcattaaacgctttattgagctggtgattaccaatacctaa

SEQ ID NO: 18 - DNA, 1425 bp, Artemisia annua
atgaccacactggaactggtttttattccgagtcctggtgcaggtcatctgcctccgaccgttgaactggcaaaactgctgctggatcacgatcagcgtctgagcgttaccattattatcatgaatctgccgtttgaagccaaacaggttaccgaaacactgattagcacaccgcgtctgaattttatctatgtgccgaatgaagatagcagcaaagatctgattagtccgcatacctttatgagcgcatttctggaacatcagaaaccgaaactgaagaacatcatcaaagatatcaccgaaagcgatagcgttcgtctggttggttttgttgttgatatgttttgcattgccatgatcgatgtggccaatgaatttggtgttccgacctatgtgtattttaccagcagcgcaagcgcactgggtctgatgtttcatctgcaggcaaaatgtgatggcgaagaatatgatgttaccgatctgaaagatagcgatctgatgctgagcattccgagctatgttaaaccgattcctgcaaaactgttaccgagcgttctgagcgataaacaaggtggtagcaaaatgtttattgatctggccaaaaaattccgcgaaagcgaaggcattatcatcaacagctttcaagaactggaaagccacggttttgagtttctgattaaaggcgatcgtaatatccctccggtttttccggttggtccgattctgaatctgaaaaacaccaaaaatgatggcaaaaccaccgatattatggcatggctggatagccagccgaaaagcagcgttgtttttctgtgttttggtagcatgggtagctttggtgaaaaacaggtgaaagaaattgcagttgcactggaacgtagcgaacatcgttttctgtggtcactgcgtcgtccgcctagcaaagaagttatgcgtctgccggaagagtatgagaactttaaagaagttctgcctgaaggtttcctggaacgcaccctgaatctgggtaaagttattggttgggcaccgcagaccagcgtgctgagccatccgagtttaggtggctttgttagccattgtggttggaatagcaccctggaaagcatttggtttggtgtgccggttgcagcatggcctctgtatgcagaacagcagattaatgcatttcagctggttatggaactgggtattgcagccgaaatcaaaatcgattacaaaagcaatattggtcctggtggtggcagcaatgaaatgctggttaaagccgatgaaattgaaagcggtattcgtcgtctgatgaacgatgatgatatgcgtcgtaacgtgaaagagatgaagcataaaagccgtctgaccgtgaccgaaggtggttcaagctatgcaagcattaaacgctttattgagctggtgattaccaatacctaa

SEQ ID NO: 19 - DNA, 1416 bp, Artemisia annua
atgaaaaccagcgaactggtgtttattccgagtccgggtgttagccatctgaccccgaccgttgaactggcaaaactgctgctggcacgtgatgatcgtctgagcgttaccattattatcatgaaactgttgctgggcgataaacatgataccggtacaccggttagcaccgatcgtctgcgttatattgaaattccgtgtgatgaaagcaccatggcactgattaatccggaaacctttctgaccgcatttgtggaacacaataaaacccatgtgcgtaatattgtgcgcgaaaacattattgaaagcgatagcgttcgtctggcagcatttgttctggatatgttttgtatgggtatggccgatgttgccaatgaatttggtgttccgagctataactattttacctgtggtgcatgtatgctgggtctgatgtttgatctgcaggcaaaacgtgatgaagagggtcatgatgttaccgaactgaaagatagcggtctggaactgagcattccgagctttgttaatccggttccggcaaaagttctgcctgaaccggtgctggataaaaaaggtggtagcaaaatgtttctggatctggcaaatcgtttccgtgaaaccaaaggtgttatcatcaatacctttcaagaactggaaagccagggtgttgaatatctgctgagcagcagcgcaaatattccgcctgtttttccggttggtccgattctgaatctgagcaaagcaaaaaatgatagcaagaccgaagaaatcatgacctggctgaataatcagccggaaagcagcgttgtttttctgtgttttggtagcatgggtagctttagcgagaaacaggttaaagaaattgccattgcactggaacgtagccgtcatcgttttctgtggtcactgcgtcgtccgcagccggaaggtagtatggaacagccgaaagaatatgagaactatgaagaagtgctgccgaaaggctttattgaacgtaccagcagcgtgggtaaagttattggttgggcaccgcagaccgcagttctgagccatccgagcgttggtggttttgtgagccattgtggttggaatagcaccctggaaagcatttggtgtggtgtgccgattgcagcatggcctctgtatgcagaacagcagaccaatgcatttcagctggttgtggaactgggtattgcagcagaaattcgtattgattatcgtagcgatatgggtcgcggtatctataatatgaccgttgcagcggaagaaattgaagatggtattcgtcgtctgatgaacgatcatgaaatgcgcaataaaatgaaagagatgaaagaaaaaagccgcagcgcagtgctggaaggtggttcaagctatgcaagcattggtaactttatcgatcacctgaacatttaa

SEQ ID NO: 20 - DNA, 1416 bp, Artemisia annua
atgaaaaccagcgaactggtgtttattccgagtcctggtgcaggtcatctgcctccgaccgttgaactggcaaaactgctgctggatcgtgatgatcgtctgagcgttaccattattatcatgaaactgtttgtgggtgccaaacatgataccggtacaccgattagcaccgatcgtctgcgttatattgatattccgtgtgatgaaagcaccatggcactggttacaccggaaacctttctgagcacctttatcgaacacaacaaaattcatgtgcgcaacattgtgcgcgaaaacattattgaaagcaatagcgttcgtctggttggttttgttctggatatgttttgtatgaccatggtggatgtggccaatgaatttggtgttccgacctataactattttaccagcagcgcaagcatgctgggtctgatgtttgatctgcaggcaaaacgtgatgaagagggtcatgatgttaccgaactgaaagatagcggtctggaactgagcattccgagctatgttaatccggttccggcaaaagttctgcctgaagttgtgctggataaaaaaggtggtagcaaaatctttctggatctggccaaacgttttcgtgaaaccaaaggcattatcatcaacacctttcaagaactggaaagtgatggtgttgaatatctgctgagcagcaatgcaaatattccgcctgtttttccggttggtccgattctgaattttagcaaagcaaaaaacgacagcaagaccgaagaaattatgacctggctgaatgatcagctggaaagcagcgttgtttttctgtgttttggtagcatgggtagctttagcgagaaacaggttaaagaaattgccattgcactggaacgtagcggtcatcgttttctgtggtcactgcgtcgtccgcagccgaaaggtaaaatggaacagcctaaagaatatgagaactacgaagaagtgctgccggaaggttttattgaacgtaccctgagcgttggtaaagttattggttgggcaccgcagaccaccgttctgagccatccgagcattggtggttttgtgagccattgtggttggaatagcaccctggaaagtatttggtgtggtgtgccgattgcagcatggcctctgtatgcagaacagcagattaatgcatttcagctggttgtggaactgggtattgcagcagaaattcgtattgattatcgtagcgatatgcgtcgcggtattaacaatatgaccgttgcagcggaagaaattgaagatggtattcgtcgtctgatgaacgatcatgaaatgcgcaacaaagtgaaagaaatgaaagagaaatcacgtctggcagttctggaaggtggttcaagctatgcaagcgttggtcattttattgatcacctgaacatttaa

SEQ ID NO: 21 - DNA, 1425 bp, Stevia rebaudiana
atgagcaccagcgaactggtttttattccgagtcctggtgcaggtcatctgcctccgaccgttgaactggcaaaactgctgctgcatcgtgatcagcgtctgagcgttaccattattgttatgaatctgtggctgggtccgaaacataataccgaagcacgtccgtgtgttccgagcctgcgttttgttgatattccgtgtgatgaaagcaccatggcactgattagcccgaatacctttattagcgcatttgtggaacatcataaaccgcgtgttcgtgatattgtgcgtggtattattgaaagcgatagcgttcgtctggcaggttttgttctggatatgttttgtatgccgatgagtgatgtggccaatgaatttggtgtgccgagctataactattttaccagcggtgcagcaaccctgggtctgatgtttcatctgcagtggaaacgtgatcatgaaggttatgatgcaaccgaactgaaaaatagcgataccgaactgtcagttccgagctatgttaatccggttccggcaaaagttctgcctgaagttgtgctggataaagaaggtggtagcaaaatgtttctggatctggcagaacgtattcgtgaaagcaaaggcattattgtgaatagctgtcaggcaattgaacgtcatgcactggaatatctgagcagcaataacaatggtattccgcctgtttttccggttggtccgattctgaatctggaaaacaaaaaagatgatgccaaaaccgatgaaattatgcgctggctgaatgaacagccggaaagcagcgttgtttttctgtgttttggtagcatgggcagctttaatgagaaacaggttaaagaaattgccgtggccattgaacgtagcggtcatcgttttctgtggtcactgcgtcgtccgacaccgaaagaaaaaattgaatttccgaaagaatatgagaacctggaagaagtgctgccggaaggttttctgaaacgtaccagcagcattggtaaagttattggttgggcaccgcagatggcagttctgagccatccgagcgttggtggttttgttagccattgtggttggaatagcaccctggaaagcatgtggtgtggtgttccgatggcagcatggcctctgtatgcagaacagaccctgaatgcatttctgctggttgttgaattaggtctggcagccgaaattcgtatggattatcgtaccgataccaaagcaggctatgatggtggtatggaagttaccgttgaagaaattgaagatggcattcgcaaactgatgtcagatggtgaaattcgcaacaaagtgaaggacgtgaaagagaaaagtcgcgcagcagttgttgaaggtggttcaagctatgcaagtatcggcaaattcatcgaacatgttagcaacgtgaccatttaa

SEQ ID NO: 22 - DNA, 1425 bp, Artificial
  Artificial sequence
atgtccacctccgaattggttttcattccatctccaggtgctggtcatttgccaccaactgttgaattggctaagttgttgttgcacagagatcaaagattgtccgttaccatcatcgttatgaatttgtggttgggtccaaagcacaatactgaagctagaccatgtgttccatctttgagattcgttgatatcccatgtgatgaatctaccatggctttgatttctccaaacaccttcatttccgctttcgttgaacatcataagccaagagttagagatatcgtcagaggtatcatcgaatccgattctgttagattggctggtttcgttttggatatgttctgtatgccaatgtccgatgttgctaatgaatttggtgttccctcttacaactacttcacttctggtgctgctactttgggtttgatgtttcacttgcaatggaagagggatcatgaaggttatgatgctactgagttgaagaactctgataccgaattgtctgtcccatcttacgttaatccagttccagctaaagttttgccagaagttgttttggacaaagaaggtggttctaagatgttcttggatttggccgaaagaatcagagaatccaagggtattatcgtcaactcttgccaagctattgaaagacatgccttggaatacctgtcctctaacaacaatggtattccaccagtttttccagttggtccaattttgaacttggagaacaaaaaggatgatgccaagaccgacgaaattatgagatggttgaatgaacagccagaatcctctgttgttttcttgtgttttggttccatgggttctttcaatgagaagcaggtaaaagaaattgccgttgccatagaaagatccggtcatagatttttgtggtctttgagaaggccaactccaaaagaaaagatcgaattcccaaaagagtacgagaacttggaagaagttttaccagagggtttcttgaagagaacctcttctattggtaaggttattggttgggctccacaaatggctgttttgtctcatccatctgttggtggttttgtttctcattgcggttggaattctaccttggaatctatgtggtgtggtgttccaatggctgcttggccattatatgctgaacaaactttgaacgccttcttgttggttgtcgaattgggtttagctgccgaaattagaatggattacagaactgataccaaggctggttacgatggtggtatggaagttactgttgaagaaatcgaagatggcatccgtaagttgatgtctgatggtgaaatcagaaacaaggtcaaggacgtcaaagaaaaatctagagctgctgttgttgaaggcggttcttcttatgcttcaatcggtaagttcatcgagcacgtttctaacgttaccatttga

SEQ ID NO: 23 - DNA, 1443 bp, Helianthus annuus
atgcagcagatgatgaccagcgaactggtttttattccgagtcctggtgcaggtcatctgcctccgaccgttgaactggcaaaactgctgctgcatcgtgatgaacgtctgagcgttaccattattatcatgaatctgccgtttggtccgaaacataatacccagacaccgagctgtacaccgcgtctgcgttttattgatctgccgtgcggtgatagcaccatggcactgattaccccgaaaacctttctgagcgcatttgtggaacatcataaaagcaatgtgcgtgatattgtgcgtggtattaccgaaagcaatagcgcacagctggcaggttttgttgttgatatgttttgtattgccatgaccgatgtggccaatgaatttggtgcaccgacctatacctattttaccagcggtgcagcaaccctgggtctgatgttttatctgcaggcaaaacgtgatcaagaggccgatgatgttaccgaactgaaaaatagcgttacgagcgaactgaatgcaccgggttttatcaatccggttccggcaaatgttctgccggaagttgttctggataaagaaggtggtagcaaaatgtttctggatctggccaaacgttttcgtgaaaccagcggtattattgttaataccctgcaggatctggaaagccaggcactgaaatatctgctgtgtagcagcaatgaaattccgcctgtttttgcagttggtccgattctgaatctggaatccaaaaatctggataacggcaaaaccgatgaaattatgcgttggctgaataaacagccggaaagcagcgttgtttttctgtgttttggtagcatgggcagctttaatgaaaaacaggttaaagaaattgccgtggccattgaacagagcggtcagcgttttctgtggtcactgcgtcgtccgcctccgaaagaaaaatttgaatatccgaaagagtacgacaacttcgaagaagttctgcctgaaggctttctggcacgtaccagcagcctgggtaaagttattggttgggcaccgcagatggcagttctgagccatccgagcgttggtggttttgttagccattgtggttggaatagcaccctggaaagcatttggtgtggtgttccggttgcagcatggcctctgtatgcagaacagcagctgaatgcctttcagctggttgttgaattaggtctggcagttgaaattcgtatggattatcgtaccgatacacgtgccggtggtggtggtagtggtatgattgttctggccgaagaaattgaagatggtattcgtaaactgatgagcgacgatgaaatgcgcaaaaaagtgaaggacatgaaagagaaaagtcgcgcagcagttctggaaggtggttcaagccatgcaagcgttggcaaattcatcgatctggttgttaacgtgaccatttaa

SEQ ID NO: 24 - DNA, 1443 bp, Artificial
  Artificial sequence
atgcagcagatgatgacctccgaattggtttttattccatctccaggtgctggtcatttgccaccaactgttgaattggctaagttgttgttgcatagggacgaaagattgtccgttaccattatcattatgaacttgccatttggcccaaagcacaatactcaaactccatcttgtactccaagattgagattcattgatttgccatgtggtgattctaccatggctttgattactccaaagactttcttgtccgctttcgttgaacatcacaagtccaatgttagagatatcgttagaggtatcaccgaatctaactctgctcaattggctggttttgttgttgacatgttctgtattgctatgaccgatgttgctaatgaatttggtgctccaacttacacttactttacatctggtgctgctactttgggtttgatgttttacttgcaagctaagagggatcaagaggctgatgatgttactgaattgaagaactctgtcacctcagaattgaatgctccaggttttatcaatccagttccagctaatgttttgccagaagttgttttggacaaagaaggtggttctaagatgttcttggatttggctaagagattcagagaaacctccggtattattgtcaacaccttgcaagatttggaatcccaagctttgaagtacttgttgtgctcctcaaacgaaattccaccagtttttgctgttggtccaatcttgaacttggagtctaagaatttggataacggtaagaccgacgaaatcatgagatggttgaacaaacaaccagaatcctccgttgttttcttgtgttttggttctatgggttccttcaatgagaagcaggtaaaagaaattgccgttgccattgaacaatccggtcaaagatttttgtggtctttgagaaggccaccaccaaaagaaaaattcgaatacccaaaagagtacgacaacttcgaagaagttttgcctgaaggtttcttggctagaacttcttcattgggtaaagttattggttgggctccacaaatggctgttttgtctcatccatctgttggtggtttcgtttctcattgtggttggaattctaccttggaatctatttggtgtggtgttccagttgctgcttggccattatatgctgaacaacaattgaacgccttccaattggttgtcgaattgggtttagctgtcgaaatcagaatggattacagaactgatacaagagccggtggtggtggttctggtatgatagttttagctgaagaaatcgaggacggcatcagaaaattgatgtctgatgacgagatgcgtaaaaaggttaaggacatgaaggaaaagtctagagctgctgttttggaaggtggtagttctcatgcttcagttggtaaattcatcgatttggttgttaacgtcaccatctaa

SEQ ID NO: 25 - DNA, 1428 bp, Lactuca sativa
atgaccaccagtgaactggtttttattccgagtcctggtgcaggtcatctgcctccgaccgttgaactggcacgtctgctgctggatcgtgatcagcgtctgagcattaccattattatcatgaatctgccgctggaagcaaaaccggataccgaaacaccgaccagcacaccgcgtctgcgtctgattgatattccgtcagatgatagcaccaaagatctgattagcccgaatacctttatcagcaaatttctggaaaatcagaaaccgcgtgttcgtgatattgttagcggtattaccgaaagccatagcgttcgtctggttggttttgttgttgatatgttttgtgttgccatgaccgatgtggcaaatgaatttggtgttccgacctatctgtattttaccagcagcgcagcagcactgggtctgatgtttgatctgcaggcaaaacatgatgatgaggattttgatgtgaccgagctgaaagatagcgaactggaagttagcctgccgagctatgcaaatccggttccggcaaaagttctgccgagcgttctgtttgataaagatggtggttgtaacacctttattggtctggcacgtaaatatcgtggtatgaaaggcattctggtgaacacctttgaagaactggaacggtatgcaatggaaagttttctgcgtagcaatgcaaatattccgctggtttttccggttggtccgattctgaatctgaaaaccccgaccaatgatggtaaagcagatggtattatgacctggctggatgatcagccggattgtagcgttgtttttctgtgttttggtagcatgggcagctttaatgaagaacaggttaaagaaattgccgtggcactggaaaaaagcggtcagcgttttctgtggtcactgcgtcgtccgcctagcaaagataaactgatgggtctgccgaaagattatgagaactatgaagatgttctgccggaaggttttctggaacgtaccagcggtgttggtaaagttattggttgggcaccgcagaccgcagttctgagccatagcagcgttggtggctttgttagccattgtggttggaatagcaccctggaaagcatttggtgcggtgttccggttgcagcatggcctctgtatgcagaacagcagctgaatgcatttaaactggttgttgaattaggtctggcagccgaaatcaaaattgattatcgtagcaatatgcgtcctggtggcaatgaaaaagaagttattgtttcagccgcagaaattgaaagcggtattcgtcgtctgattagtgatggtgaaatgcgcaaaaaagtcaaagaaatgaaagaaaaaagccgctttgcagttagcgaaggtggtagcagccatgcaagcattggtcgttttattgatcatgtgatcgtgaatgaataa

SEQ ID NO: 26 - DNA, 1416 bp, Lactuca sativa
atgaccaccagtgaactggtttttattccgagtcctggtgcaggtcatctgcctccgaccgttgaactggcaaaaattctgctggatcgtgatcagcgtctgagcattaccattattgtgatgaaaattagcctgggtgccaaacatgataccgaaagcgcaaccccgattccgcgtctgcgttatattgatattccgtgtgatgaatcaaccatggcactgattagcccgaaaacctttctgagcgcatttatcgaacatcataaaccgcatgtgcgtaacattattcgcagcattattgaaagcaatagcgttcgtctggcaggtctggttctggatatgttttgtgcaccgatgaccgaagttgccaatgaatttgaagcaccgacctatatctattataccagcggtgcaagcatgctgggtctgcagctgaccctgcaggcaaaacgtgatgaagaggaacatgatgttaccgaactgaaaggtagcgaaagcgaactgagcattccgacctttgttaatagtgttccggcaaaagttctgttagatgtgctgctggataaagaaggtggtagcaaaatgtttctggatctggccaaaacatttcgtgaaagcaaaggtattctggtgaacacctttcaagaactggaaagccatggtgttgattatctgctgagcagcaatgcagatattccgcctgtttttccggttggtccgattctgaatctgaaaaatgcaaccaatgatggcaaaaccgatgaaattatgacctggctgaatgatcagccggaaagcagcgttgtttttctgtgttttggtagcatgggtagctttagcgagaaacaggttaaagaaattgcagttgcagttgaacgtagcggtcagcgttttctgtggtcactgcgtcgtccgcctccgaaaggtaaaattgaatatccgaaagattacgaaaacccggaagaagttctgccggaaggtttcctggatcgtaccagcagcgtgggtaaagttattggttgggcaccgcagaccgcagttctgagccatccgagcgttggtggttttgttagccattgtggttggaatagcaccctggaaagcatttggtgtggtgttccggttgcagcatggcctctgtatgcagaacagcagctgaatgcctttcagctggttgttgaattaggtctggcagcagaaattcgtattgattatcgtcgtaatgttggtccggaagaaaccgaaatgattgttacagccgaagaaattgaaggtggcattcgtaaactgatgagtgatggtgaaatgcgcaaaaaggtcaaagaaatgaaagagaaaagccgtctggcaattgcggaaggtggttcaagccatgcagcaattggtcgttttattgaacatgtgattagcgaataa

SEQ ID NO: 27 - DNA, 1416 bp, Artificial
  Artificial sequence
atgaccacctccgaattggttttcattccatctccaggtgctggtcatttgccaccaactgttgaattggctaagatcttgttggacagagatcagagattgtccattaccatcatcgtcatgaagatttctttgggtgctaagcacgatactgaatctgctactccaattccaagattgaggtacattgatattccatgcgacgaatctaccatggctttgatttctccaaagactttcttgtccgccttcatcgaacatcataagccacatgttagaaacatcatcaggtccatcatcgaatccaactctgttagattggctggtttggttttggatatgttttgtgctccaatgaccgaagttgctaatgaatttgaagctcccacctacatctattacacatctggtgcttctatgttgggcttgcaattgactttacaagctaaaagggatgaagaagaacacgacgttactgaattgaagggttctgaatccgaattgtctattccaaccttcgttaattctgttccagccaaagttttgttggacgtcttgttagacaaagaaggtggttctaagatgttcttggatttggctaaaaccttcagggaatccaagggtattttggttaacaccttccaagaattggaatcccatggtgttgattacctgttgtcatctaatgctgatatcccaccagtttttccagttggtccaattttgaacttgaagaacgctaccaacgatggtaagactgacgaaattatgacttggttgaatgaccaaccagaatcctctgttgttttcttgtgttttggttccatgggtagcttctctgaaaagcaggtaaaagaaattgctgttgccgttgaaagatccggtcaaagatttttgtggtctttgagaaggccaccaccaaaaggtaaaattgaatacccaaaggactacgagaacccagaagaagttttgccagaaggttttttggatagaacctcttctgttggtaaggttattggttgggctccacaaactgctgttttgtctcatccatctgttggtggttttgtttctcattgtggttggaactctaccttggaatctatttggtgtggtgttccagttgctgcttggccattatatgctgaacaacaattgaacgccttccaattggttgtcgaattgggtttagctgccgaaattagaatcgactacagaagaaatgttggtcccgaagaaactgaaatgatcgttactgctgaagaaatcgaaggtggtatcagaaagttgatgtctgatggtgagatgcgtaaaaaggtcaaagagatgaaggaaaagtccagattggctattgctgaaggtggatcttctcatgctgctataggtagattcattgaacacgtcatctccgagtaa

SEQ ID NO: 28 - DNA, 1443 bp, Sesamum indicum
atgaaaaaagccgaactggtgtttattccgagtcctggtatgggtcatctggttagcaccgttgaactggcaaaactgctgattgatcgtggtgaacagctgagcattaccgttctgattatgaaactgccgttcgacaaaaaagttagcagctataccagtatgctgagcgaaagcagcgatagccgtattcgttttctggatctgaaaccgggtgaaagcagcagccagagcacctttagcagcgcatttctgtatcactttatcgacaatcataaaagcagcgtgcgtgatattctggcagaaatgaccaatagcgccagcagcgatctggcaggcgttgttattgatatgttttgtaccagcatgatcgatgtggccaatgaatttggtgttccgagctatatcttttataccagcggtgcagcaatgctgggtttagttctgcacatgcagagcctgcgtgcagattttaatgaagatgtgaccaactacaaaaacagcgacgtggaactggccattccgacctatattaacccggttccggcaaaagttctgccgagcgttatttttgataaagatggtggttgcgacatgtttctgaatcaggcaaaacgttataaagaaaccaagggcattatcatcaacacgtttctggaactggaaagccatgcagttaaagcactgagcaatgataaaaccattccgcctgtttatgccgttggtccggtgctgaatctgaaaggtagcaatggtccgaatcaggataccgaaatgatcatgaaatggctggataatcagccggttagcagcgtggtttttctgtgttttggtagcgcaggtagctttgatggcgaacaggttaaagaaattgcacatgccctgcagcgtagcggtgtgcgctttctgtggtcactgcgtcgtccgcctccgaaaggtaaatttcagtttccgggtgattatgaggatccggaagaagtgctgccggaaggttttctgcgtggcaccgcagaagttggtaaagttattggttgggctccgcaggttgcagttctgagccatcgtgcagttggtggttttgttagccattgtggttggaatagcaccctggaaagcgtttggtgtggtgtgccgatggcaacctggcctctgtatgcagaacagcagaccaatgcatttctgatggttaaagatttaggtatggccgtcgagatcaaaatggattttcgtaaagatttcctgatggaagccaacgaaattgttcgtgcagtggttattgaaaacggtatcaaacagctgatggaaagcgaaagcgaatttcgcaacaaagtgaaagagatgaaagaaaaatcacgcatggcactgcacggtggtggtagcagcagtgatagcctgcgtcgctttctggatgatattatggataatgttccgaaactgcattaa

SEQ ID NO: 29 - DNA, 1431 bp, Camellia sinensis
atgagcaaagcacagctggtttttattccgagtcctggtattggtcatctggcaagcaccgttgaaatggcaaaactgctggttggtcgtgatgatcgtctgagcattaccgttctgattatgaaatttccgttcgacaataaaggcaccaccacacagagcctgaccagcgatcgtattcgttttctggacctgtttcacgaaaccagcagcaccgcagatccgaatagcaaaaccctgttttatgattacatcgagaaccacaaaacccaggttcgtgatgttgttagcgaaattgttagcaaaagcgaaagcgaatcaacaccgcgtctggcaggttttgttattgatatgttttgcaccagcatgatcgatgtggcaaatgaatttggtgttccgacctatgtgttttttaccagcagcgcaggttttctgggtctgatgtttcatatctataccctgcagcaggatatcaccgaactgaaagatagtgatgcagaactgaatgttccggcatatgcaaatccggttccggcaaaagttctgccgagcgttctgtttgataaagaagttggttttaccatgtttctgaacatcaccaaacgttgtcgtgaaaccgaaggcattattgtgaatacctttaccgaactggaatttcatgcactgaaaagcctgcaggatgatcataccattccgaacatttatccggttggtccggttctgaatctgaaaggtggtagcccgaatgaagcacagaatagccagagcgaagcagatattatgcgttggctggatgatcaggatccgagcagcgttgtttttctgtgttttggtagcatgggtagctttgatggtgatcaggttaaagaaattgcacgtgccctggaaagctgtggtcatcggtttctgtggtcactgcgtcagcctccgcctaaaggtaatattgaactgccgaaagaatatgagaatccgaccgatgttctgccggaaggctttctggatcgtaccgcagaaattggtaaagttattggttgggcaccgcaggttgcagttctgagccatcgtgcagttggtggttttgtgagccattgtggttggaatagcaccctggaatcactgtggtgcggtgttccggttgccacctggccgatgtatgcagaacagcagatgaatgcatttcagctggttcgcgaatttggtatggcagttgaaatcaaaatggactataagatggattttggcatgaaagaaatgccggttatggttaccgcagtggaaattagcagcggtattcgtcgtctgatggatggtagtgatgagatcaaacacaaagtgaaaaaaatgagcgagaaaagcaccgtggcagttaccgaaggtggttcaagctataacagcctgggttgttttattgaggatgtgatcaaaggctaa

SEQ ID NO: 30 - DNA, 1440 bp, Camellia sinensis
atgagcaaagcacagctggtttttattccgagtcctggtattggtcatctggttagcaccgttgaaatggcaaaactgctggttggtcgtgatgatcgtctgagcattaccgttctggttatgaaatttccgctggataataaaggcaccagctatacccagagcctgagcagcgatcgtattcgttttctggacctgtttcatgataccccgagcaccgcagatctgaatagcaaaacaccgggtagctttctgtttgattatatcgaaagccataaaccgcgtgttcgtgatgttgttagcgaaattgttagcaaaagcgaaagcgaatcaacaccgcgtctggcaggttttgttattgatatgttttgtaccccgatgatcgatgtggcaaatgaatttggtgttccgacctatgtgttttttaccagcagcgcagcatttctgggtctgatgtttcatattgataccctgcagcaggatgttaccgaactggaagatagtgatgcagaactgaccgttccggcatatgcaaatccggttccggctaaatttctgccgagcgtgctgtttgataaagaaggtggtagcatgtttctgaacattgcaaaacgttgtcgtgaaaccaaaggcattattgtgaatacctttaccgagcttgaattccgtgcactgaaaagcctgcaagaagatcataccaatccgcagatgtatccggttggtccggttctgaatctgaaaggtggttcaccgaatgaagcacagaatagccagagcgaagcagatattatgcgttggctggatgatcaggatccgagcagcgttgtttttctgtgttttggtagtatgggcagctttgatggtgatcaggttaaagaaattgcacgtgccctggaaagctgtggtcatcggtttctgtggtcactgcgtcagcctccgcctaaaggtgaaattggtctgccgaaagaatatgaaaatccgacggatgttctgccggaaggctttctggatcgtaccgcagaaattggtaaagttattggttgggcaccgcaggttgcagttctgagccatcgtgcagttggtggttttgtgagccattgtggttggaatagcaccctggaatcactgtggtgcggtgttccggttgccacctggccgatgtatgcagaacagcagatgaatgcatttcagctggtgatggaatttggtatggcagcagaaatcaaaatggattaccgtaaagattatcgcatgcagaaaatgccggttatggttaccgcagatgaaattagcagcggtattcgtcagctgatggatggtagtgatgaaatcaaacacaaggtgaaaaaaatgagcgagaaaagccgtgttgcagttatggaaggtggcagcagctataatagcctgggttgttttattgaagatgtgatccagggctaa

SEQ ID NO: 31 - DNA, 1422 bp, Morella rubra
atggaaagcacccatacacaggcaagccatattgcaattctgccgacacctggtatgggtcatctgattccgctggttgaatttgcaaaacgtctgctgcatcatcatccgaacagctttaacattacctttattatcccgaccgatggtccgcctagcaaagcacagaaaagcgttctggatgcactgccgagcagcatgaattatttctttctgccggaagtgaatctggatgatgttccgaaaggtgcaaaaattgaaagcctgattagcctgaccgttgttcgtagcctgccgagcctgcgtgaagttctgaaaagcctggttgaaagcagcaaactggttgcatttgttgttgacctgtttggcaccgatgcctttgatgttgcacgtgaactgaatgttagcccgtatatcttttatccgagcaccgcaatggcactgagcctgtttctgtatctgccgaaactggatgaaatggttacctgtgaatatcgtgatcatccggaaccggttaaaattccgggttgtattccgattcatggtaaagatctgctggatccggttcaggatcgtaaaaatgatgcatataaatggctgctgcaccatgccaaacgttatcgtctggcagaaggtattctgaccaatagctttctggaactggaaccgggtgcaattgaagcactgcaggcagaagaaccgggtaaaccgcctgtttatccggttggtcctctggttaatatgggtagcagcggtaaagttgatggtagcgaatgtctgaaatggctggatgaacagccgcatggtagcgttctgtttgttagctttggtagcggtggcaccctgagcaccaaccagatgaatgaactggcactgggtttagaaaaaagcgaacagcgttttctgtgggttgtgcgtaccccgaatgatcatgttgcaaatgccacctattttagcgttcagagcgaaaaagatccgtttgattttctgcctaaaggtttcctggaacgtaccaaaggtcgtggtctggttctgccgagctgggcaccgcaggcacaggttctgagccatagcagcaccggtggttttctgacccattgtggttggaatagtattctggaaagcgttgttaatggtgttccgctgattgcatggcctctgtatgcagaacagaaaatgaatgcagttatgctgaccgaggatattaaagttgcactgcgtccgaaatttaacgataatggtctggcaggtcgtgaagaaattgcaaaagttgccaaagcactgatggaaggtgaagaaggtaaacgcctgcgtagccatatgaaaaatctgaaagatgcagccgcacgtgttctgagcgaagatggtagcagtaccaaagcgctgagcgaactggccctgaaatggaaaaataagaaataa

SEQ ID NO: 32 - DNA, 1410 bp, Castanea mollissima
atggaacagaaaccgcatattgcactgctgccgagtcctggtatgggtcatctgattccgctggttgaatttgcaaaactgtttgtgctgcatcatgattttcgcattacctgcattattccggttctgggtagcccgagcaaagcaatgaaagcagttctgcaggcactgccgaccaccattgatcatgtttttctgcctccggttattctggaagaagaagaaattaaaggcctgaaatttgaagtgcagaccattctgaccctgacacgtagcctgcctccgctgcgtgatgttctgaaaagcacccgttttagcgcatttgttgttgatccgtttggtattgatgcactggatattgccaaagagctgaaaattagcccgtatatcttttttccgaccaatgcatttgttctgagcctgatgtttcatctgccgaaactggatgaaaccgttagctgtgaatatcgtgatctgccggaaccgctgaaactgcctggttgtattccgattcatggtcgcgatctgattgaaccggtgcaggatcgtaccagcgaactgtataaaatgtttctgcgtaacgtgaaacgttttcgtctggcagaaggcattattgtcaatacctttatggaactggaaggcagcgcaattaaagcactgctggatgaagaagcaaaaaatctgccgctgtatccgattggtccgattcagagcggtagcagcaatctgcaggttgataaaagcgaaagcgattgtctgcgttggctggataatcagcctcgtggtagcgttctgtttgtttgttttggtagcggtggcaccctgagctatgatcagaccaatgaactggcactgggtttagaactgagcggtcagaaattcctgtgggttgttcgtacaccggataatgaaagcgcagatgcagcatatctgagcgatcagaccctggataataatccgctggcatttctgcctaaaggttttgttgaacgtaccgaaggtcaaggtctggcagttccgagctgggcaccgcaggcacaggtgctgagccatggtagcaccggtggttttctgacccattgtggttggaatagcaccctggaaagcattatgcagggtattccgctgattgcatggcctctgtatgcagaacagaaaatgaatgcaccgctgctggccgaagatctgaaagttgcactgcgtccgaaaaccaataaaaacggtctgattgatcgtgaagaaatcgccaaagttgttaaaggtctgatggttggtgaagagggtaaaaaagttcataatcgcatgaaagatatcaaaatcgcagcagaaaaagcactgagtgcagatggtagcagtacaaaaaccctgagcgaactggcaagccagtggaaaaatcatccgggtttttaa

SEQ ID NO: 33 - DNA, 1410 bp, Artificial
  Artificial sequence
atggaacagaagccacatattgccttgttgccatctccaggtatgggtcatttgattccattggttgaattcgctaagttgttcgtcttgcatcacgatttcagaattacctgcattatcccagttttgggttctccatctaaagctatgaaggctgttttacaagctttgccaactaccatcgatcatgtttttttgccaccagtcatcttggaagaagaagaaatcaagggtttgaagttcgaagtccaaaccattttgactttgaccagatctttaccaccattgagagatgttttgaagtccactagattctccgcttttgttgttgatccattcggtattgatgctctggatattgccaaagagttgaagatctctccttacatctttttcccaactaacgccttcgttctgtctttgatgtttcatttgccaaagttggacgaaaccgtttcttgtgagtatagagatttgccagaaccattgaaattgccaggttgcattccaattcatggtagagacttgattgaaccagttcaggatagaacttctgagctgtacaagatgtttttgagaaacgtcaagagattcagattggccgaaggtattatcgttaacaccttcatggaattggaaggttctgctattaaggccttgttggatgaagaagctaagaacttgccattatacccaattggtccaatccaatctggttcctctaacttacaagttgacaagtctgaatccgattgcttgagatggttggataatcaacctagaggttccgttttgttcgtttgttttggttctggtggtactttgtcctacgatcaaactaacgaattggccttgggtttagaattgtccggtcaaaagtttttgtgggttgttagaactccagataacgaatctgctgatgctgcttatttgtctgatcaaaccttggacaacaatcctttggcttttttgcctaagggtttcgttgaaagaactgaaggtcaaggtttggctgttccatcttgggctccacaagctcaagttttgtctcatggttctactggtggtttcttgactcattgtggttggaattctaccttggaatccattatgcaaggtattccattgattgcttggccattatatgccgaacaaaagatgaatgctcctttgttggcagaagatttgaaagttgctttgaggccaaagactaacaagaatggtttgattgacagggaagaaatcgccaaggttgttaagggtttaatggtcggtgaagaaggtaaaaaggttcacaacagaatgaaggatattaagattgctgctgagaaggctttgtcagctgatggttcttctactaagactttgtctgaattggcttcccaatggaaaaatcatccaggtttctga

SEQ ID NO: 34 - DNA, 1401 bp, Castanea mollissima
atggaacagaaaccgcatattggtattctgccgagtcctggtatgggtcatctgattccgctggttgaatttgcaaaactgctggttcatcaccacgattttaacattacctgcattattccggttctgggtagcccgagcaaagcaatgaaagcagttctgcatgcactgccgaccaccattgatcatgtttttctgcctccggttattctggaagaggaagaaatgaaaggtccgcgttttgaagttcagaccattctgaccctgacacgtagcctgcctccgctgcgtgatgttctgaaaagcacccgttttagcgcatttgttgttgatccgtttggtattgatgcactggatattgccaaagaactgaacattagcccgtatatcttttttccgaccaatgcatttgcactgagcctgatttttcatctgccgaaactggatgaaaccgttagctgtgaatatcgtgatctgccggaaccgctgaaactgcctggttgtattccgattcatggtcgcgatctggcagaaccgtttcagaatcgtaccagcgaaagctataaaatgtttctgcgtattgcgaaacgttttcgtctggccgaaggtattattgtgaatacctttatgggtttagaaggcagcgcaattaaagcactgctggaagaagaagcaaaaaatctgccgctgtatccggttggtccgattcagagcggtagcagcaatcaggttgaagaaagcgattgtctgcgttggctgggtaatcagccgcatggtagcgttctgtttgtttgttttggtagcggtggcaccctgagctatgatcagaccaatgaactggcattaggtctggaactgagcggtcagaaattcctgtgggttgttcgtaccccgaataatgaaagcgcagatgcagcatatctgagcgatcagaccctgtataataacccgctggcatttctgcctaaaggttttgttgaacgtaccgaaggtcaaggtctggcagttccgagctgggcaccgcaggcacaggttctgagccatggtagcaccggtggttttctgacccattgtggttggaatagcagcctggaaagcattatgcagggtattccgctgattgcatggcctctgtatgcagaacagaaaatgaatgccgttctgctggcggaagatctgaaagttgcactgcgtccgaaaaccaataaaaacggtctgattgatcgtgaagaaatcgccaaagttgttaaaggtctgatggatggcgaagagggtaaaaaagttcgtaatcgcatgaaggacattaaaatcgcagcagaaaaagccctgaatgttgatggtagcagtacaaaaaccctgagcaaactggcaagcaaatggaaaaatcacagctcgttttaa

SEQ ID NO: 35 - DNA, 1401 bp, Artificial
  Artificial sequence
atggaacagaagccacacattggtattttgccatctccaggtatgggtcatttgattccattggttgaattcgccaagttgttggttcatcatcacgatttcaacattacctgcatcattccagttttgggttctccatctaaagctatgaaggctgttttacatgctttgccaactaccatcgatcatgtttttttgccaccagttatcttggaagaggaagaaatgaagggtccaagattcgaagttcaaaccattttgactttgaccagatcattgccaccattgagagatgttttgaagtctactagattctccgcctttgttgttgatccatttggtattgatgctctggatatcgccaaagagttgaacatttctccctacattttcttcccaactaacgcttttgccctgtccttgatttttcatttgccaaagttggacgaaaccgtttcttgtgagtatagagatttgccagaaccattgaaattgccaggttgcattccaattcatggtagagacttggctgaaccttttcaaaacagaacctctgagtcttacaagatgttcttgagaattgccaagagattcagattggccgaaggtattatcgttaacaccttcatgggtttagaaggttctgctattaaggccttgttggaagaagaagctaagaacttgccattatatccagttggtccaatccaatccggttcctctaatcaagttgaagaatctgattgcttgaggtggttgggtaatcaaccacatggttcagttttgttcgtttgttttggttctggtggcactttgtcttacgatcaaactaacgaattggccttgggtctagaattgtcaggtcaaaagtttttgtgggttgttagaaccccaaacaacgaatctgctgatgctgcttatttgtctgatcaaaccttgtacaacaaccctttggcttttttgcctaagggtttcgttgaaagaactgaaggtcaaggtttggctgttccatcttgggctccacaagctcaagttttgtctcatggttctactggtggtttcttgactcattgtggttggaattctagcttggaatccattatgcaaggtattccattgattgcctggccattatacgctgaacaaaagatgaatgccgttttgttggctgaagatttgaaagttgctttgaggccaaagactaacaagaacggtctaatcgatagagaagaaatcgctaaggttgtgaagggtttgatggatggtgaagaaggtaaaaaggtcagaaacagaatgaaggatattaagattgctgccgaaaaggccttgaatgttgatggttcttctaccaagactttgtccaaattggcttctaagtggaagaaccactcttcgttctaa

SEQ ID NO: 36 - DNA, 1410 bp, Quercus suber
atggaacagaaaccgcatattgcactgctgccgagtcctggtatgggtcatctgattccgctggttgaatttgcaaaacagtttgtgctgcatcatgatttccatatcacctgtattattccggttctgggtagcccgagcaaagcaatgaaagcagttctgcaggcactgccgaccaccattgatcatgtttttctgcctccggttattctggaagaagaagaaattaaaggcctgaaatttgaagtgcagaccattctgaccctgacacgtagcctgcctccgctgcgtgaagttctgaaaaccacacgttttagcgcatttgttgttgatccgtttggtattgatgcactggatattgccaaagaactgaacattagcccgtatatcttttttccgagcaatgcatttgcactgagcctgatttttcatctgccgaaactggatgaaaccgttagctgtgaatatcgtgatctgccggaaccgctgaaactgcctggttgtattccgattcatggtcgcgatctgattgaaccggtgcaggatcgtaccagcgaactgtataaaatgtttctgcgtaatgccaaacgttttcgtctggcagaaggcattattgtcaatacctttatggaactggaaggcagcgcaattaaagcactgctggatgaagaagcaaaaaatctgccgctgtatccgattggtccgattcagagcggtagcagcaatctgcaggttgataaaagcgttagcgattgtctgcgttggctggataatcagccgcatggtagcgttctgtttgtttgttttggtagcggtggcaccctgagctatgatcagaccaatgaactggcactgggtttagaactgagcggtcagaaattcctgtgggttgttcgtaccccgaataatgaaagcgcagatgcagcatatctgagcgatcagattctggataataatccgctggattttctgccaaaaggttttgttgaacgtaccgaaggtcaaggtctggcagttccgagctgggcaccgcaggcacaggttctgagccatggtagcaccggtggttttctgacccattgtggttggaatagcaccctggaaagcattatgcagggtattccgctgattgcatggcctctgtatgcagaacagaaaatgaatgcaccgctgctggccgaagatctgaaagttgcactgcgtccgaaaaccaataaaagcggtctgattgatcaagaagagatcgccaaagttgttaagggtctgatgattggtgaagagggcaaaaaagtgtacaatcgcatgaaagacattaagatggcagcagaaaaagcactgagtgcagatggtagcagtaccaaagcgctgagcgaactggcaagccagtggaaaaatcatccgggtttttaa

SEQ ID NO: 37 - DNA, 1410 bp, Artificial
  Artificial sequence
atggaacagaagccacatattgccttgttgccatctccaggtatgggtcatttgattccattggttgaattcgctaagcaattcgtcttgcatcatgatttccatattacctgcatcatcccagttttgggttctccatctaaagctatgaaggctgttttacaagctttgccaactaccatcgatcatgtttttttgccaccagtcatcttggaagaagaagaaatcaagggtttgaagttcgaagtccaaaccattttgactttgaccagatctttaccaccattgagggaagttttgaaaaccactagattctccgctttcgttgttgatccatttggtattgatgctctggatatcgccaaagagttgaacatttctccctacattttcttcccatctaacgcttttgccctgtccttgatttttcatttgccaaagttggacgaaaccgtttcttgtgagtatagagatttgccagaaccattgaaattgccaggttgcattccaattcatggtagagacttgattgaaccagttcaagatagaacctctgagctgtacaagatgtttttgagaaacgccaagagattcagattggccgaaggtattatcgttaacaccttcatggaattggaaggttctgctattaaggccttgttggatgaagaagctaagaacttgccattatacccaattggtccaatccaatctggttcctctaacttacaagttgacaagtctgtttccgattgcttgagatggttggataatcaaccacatggttccgttttgttcgtttgttttggttctggtggtactttgtcctacgatcaaactaacgaattggccttgggtttagaattgtccggtcaaaagtttttgtgggttgttagaactccaaacaacgaatctgctgatgctgcttatttgtccgatcaaatcttggacaacaaccccttggattttttgcctaagggtttcgttgaaagaactgaaggtcaaggtttggctgttccatcttgggctccacaagctcaagttttgtctcatggttctactggtggtttcttgactcattgtggttggaattctaccttggaatccattatgcaaggtattccattgattgcttggccattatatgccgaacaaaagatgaatgctcctttgttggcagaagatttgaaagttgctttgaggccaaagactaacaagtccggtttgattgatcaagaagagattgccaaggttgttaagggtttaatgattggtgaagagggcaaaaaggtctacaatagaatgaaggatattaagatggctgccgagaaagctttgtcagctgatggttcttctactaaggctttatctgaattggcttcccaatggaaaaatcacccaggtttctaa

SEQ ID NO: 38 - DNA, 1419 bp, Quercus suber
atgctgagcaaaatggaacagaaaccgcatattgcactgctgccgagcttaggtatgggtcatctgattccgctggttgaatttgcaaaacagtttgtgctgcatcatgatttccatatcacctgtattattccggttctgggtagcccgagcaaagcaatgaaagcagttctgcaggcactgccgaccgcaattgatcatgtttttctgcctccggttaaactggaagaagaagaaattaaaggcctgaaatttgaagtgcagaccattctgaccctgacacgtagcctgcctccgctgcgtgaagttctgaaaagcacccgttttagcgcatttgttgttgatccgtttggtattgatgcactggatattgccaaagaactgaacattagcccgtatatcttttttccgaccaatgcatttgcactgagcctgatttttcatctgccgaaactggatgaaaccgttagctgtgaatatcgtgatctgccggaaccgctgaaactgcctggttgtattccgattcatggtcgcgatttactggaaccggtgcaggatcgtaccagcgaactgtataaaatgtttctgcgtaatgccaaacgttttcgtctggcagaaggcattattgtcaatacctttatggaactggaaggcagcgcaattaaagcactgctggatgaagaagcaaaaaatctgccgctgtatccgattggtccgattcagagcggtagcagcaatcaggttgataaaagcgaaagcgattgtctgcgttggctggataatcagccgcatggtagcgttctgtttgtttgttttggtagcggtggcaccctgagctatgatcagaccaatgaactggcactgggtttagaactgagcggtcagaaattcctgtgggttgttcgtaccccgaataatgaaagcgcagatgcagcatatctgagcgatcagaccctgaataataacctgctggcatttctgcctaaaggttttgttgaacgtaccgaaggtcaaggtctggcagttccgagctgggcaccgcaggcacaggttctgagccatggtagcaccggtggttttctgacccattgtggttggaatagcaccctggaaagcattatgcagggtattccgctgattgcatggcctctgtatgcagaacagaaaatgaatgcaccgctgctggccgaagatctgaaagttgcactgcgtccgaaaaccaataaaaacggtctgattgatcgtgaagaaatcgccaaagttgttaagggcctgatgattggtgaagagggtaaaaaagtgtacaaccgcatgaaagacattaaaatggcagcagaaaaagcactgagtgcagatggtagcagtaccaaagcgctgagcgaactggcaagccagtggaaaaatcatccgggtttttaa

SEQ ID NO: 39 - DNA, 1419 bp, Artificial
  Artificial sequence
atgctgtccaagatggaacagaagccacatattgctttgttgccatctttaggtatgggtcatttgatcccattggttgaatttgctaagcaattcgtcttgcatcacgatttccatattacctgcattatcccagttttgggttctccatctaaagctatgaaggctgttttacaagctttgccaactgccattgatcatgtttttttgccaccagtcaagttggaagaagaagaaatcaagggtttgaagttcgaagtccaaaccattttgactttgaccagatctttaccaccattgagagaagttttgaagtccactagattctccgcttttgttgttgatccattcggtattgatgctctggatattgccaaagagttgaacatctctccctacatttttttcccaactaacgctttcgccctgtccttgatttttcatttgccaaaattggacgagactgtctcttgtgagtatagagatttgccagaaccattgaaattgccaggttgcattccaattcatggtagagacttgttggaaccagttcaagatagaacttctgagctgtacaagatgttcttgagaaacgctaagagattcagattggccgaaggtattatcgttaacaccttcatggaattggaaggttctgctattaaggccttgttagatgaagaagctaagaacttgccactgtatccaattggtccaattcaatccggttcctctaatcaagttgacaagtctgaatctgattgcttgagatggttggataatcaaccacatggttccgttttgttcgtttgttttggttctggtggtactttgtcctacgatcaaactaacgaattggccttgggtttagaattgtccggtcaaaagtttttgtgggttgttagaactccaaacaacgaatctgctgatgctgcttatttgtctgatcaaaccttgaacaacaacctgttggcttttttgcctaagggtttcgttgaaagaactgaaggtcaaggtttagctgttccttcatgggctccacaagctcaagttttgtctcatggttctactggtggtttcttgactcattgtggttggaattctaccttggaatccattatgcaaggtattccattgattgcctggccattatacgctgaacaaaaaatgaatgctcctttgttggctgaggatttgaaggttgctttaagaccaaagactaacaagaacggtttgattgacagagaagagattgccaaggttgttaagggtttaatgattggtgaagagggcaaaaaggtctacaatagaatgaaggatattaagatggctgccgagaaagctttgtcagctgatggttcttctactaaggctttatctgaattggcttcccaatggaaaaatcacccaggtttctaa

SEQ ID NO: 40 - DNA, 1410 bp, Quercus suber
atggaacagaaaccgcatattgcaattctgccgagtcctggtatgggtcatctgattccgtttgttgaatttgcaaaactgctgctgcttcaccatgattttcatattacctgcattattccgaccattggtagcccgagcaaagcaatgcgtgaagttctgcaggcactgccgaccagcattgatcatgtttttctgcctccggttagcctggaagaattaggtggtgttaaaccgggtattcagattaccctgaccatgattcgtagcctgcctccgctgcgcgaagtgctgaccagcctggttgcaacaacccgtctggttgcactggttgttgacctgtttggcaccgatgcgctggatgttgcaaaagaactgaatgttagcccgtatatcttttatccgaccaatgcaatggttgtgagcctggttctgcatctgccgaaactggatgaaaccgttagctgtgaatatcgtgatctgccggaaccggttaaactgcctggttgtgttccgattcatggtcgcgatctgctggatccgattcaggatcgtaccaccgaactgtataaactgtttctgcgtggtgcaaaatggctgcgtctggtggaaggtattattgtgaatacctttatggaactggatggcaacgttattaaagccctggaagatgaagaagcaaaaagcggcaccatttataccattggtccgattattcagagcagcagtaccaaacatgttgaaggtagtgatggtctgcgttggctggataatcagcctcgtggtagcgttctgtttgtttgttttggtagcggtggcaccctgagctatgatcagatgaaagaactggcactgggtttagaactgagcaaacagaaattcctgtgggttgttcgtagcccgaataatgaactggcccaggcagcatattttagcgatcagaccctggataataatccgctgagctttctgccggttggttttattgaacgtaccaaagaacaaggtctggttgttccgagctgggcaccgcaggcacaggttctgagccatgatagcaccggtggttttctgagtcattgtggttggaatagcaccctggaaagcattatgcagggtattccgctgattgcatggcctctgtttgcagaacagcgtatgaatgccctgctgctgaccgaagatctgaaagttgcactgcgtccgaaagccaatgaaaaaaatctggttgatcgtgaagaaatcgccaaagtgattaaaagcctgatggttggtgaagatggcaaaaaaatccatagccgtatgaaagacctgaaaatcgcagcagaaaaagcactgagcccgaatggtccgagcaccaaagcactggcagatctggcaagccattggaccaatcagagcaatagctaa

SEQ ID NO: 41 - DNA, 1398 bp, Quercus suber
atggaacagaaaccgcatattgccatttttccgagtcctggtatgggtcatctgattccgcatctggaactggcaaaactgctggcactgcatcataattttcatatcacctgtattattagcgttctgggtagcccgagccgtgcaatgaaagaagttctgcaggcactgccgaccagcattgatcatgtttttctgcctccggttagcagcgaagatctggaaggtctgctgccggaagttcagaccattctgaccctgacacgtagcctgcctccgctgcgtgatgttctgaaaagcacccgttttgcagcatttattgttgatacctttggtatggatgcactggatgttgccaaagaatttaacattagcccgtatatcttttttctgagcaatgcatttgcactgagcctggttctgcatctgccgaaactggatgaaaccattagcggtgaatatcgtgatcaggcagaaccgctgaaactgcctggttgtgttccgattcatggtcgtgatctggccgagccggttcaggatcgtaccagctattggtataaaatgtttctgcgtagcaccaaacgtatgcgtctggccgaaggtattatgtttaatacctttatggaactggaagagaacgccattaaagcactgctggatgaagaagcaaaaagcctgccgctgtatccgattggtccgattattcagaccggtagcagcaatcagtttaaaggtagcgattgtctgcgttggctggatagccagccgcatggtagcgtgctgtttgtttgttttggtagcggtggcaccctgagctatgaacagaccaatgaactggcatttggcctggaactgagcgaacagaaattcctgtgggttgttcgtaccccgaataatgaaagtgccggtgcaagctatctgagcgatcagaccctggaaaataatccgctgaccagcctgccgaaaggttttgttgaacgcaccaaaggtcaaggtctggttgttccgagctgggcaccgcaggttcaggttctgagccatagcagcaccggtggttttctgagtcattgtggttggaatagcaccctggaatcagttatgcagggtattccgctgattgcatggcctctgtttgcagaacagcgtatgaatgcagttctgctggcagaagatctgaaagttgcactgcgtccgaaagcaaatgaaaaaggcctggttcatcgtgatgaaattgccaaagttgttaaaggtctgatggttggtgaagagggtaaaaaagttcatagccgtatgaaagacctgaaagatgcagcagaaaaagcactgagcgttgatggtagcagtaccaaagcgctgaccgatctggccctgcattggaccaatcaggcacgtttttaa

SEQ ID NO: 42 - DNA, 1407 bp, Quercus suber
atggaacagaaaccgcatattgcactgctgccgagtcctggtatgggtcatctggttccgctggttgaactggcaaaactgctgctgttacatcatgattttcacatcacctgtattattccggttctgggtagcccgagcaaagcaatgaaagcagttctgcaggcactgccgaccagcattgatcatgtttttctgcctccggttattctggaagaagaagaaattaaaggcctgaaactggaagttcaggcaatgctgaccctgacacgtagcctgcctccgctgcgtgatgttctgaaaagcacccgttttagcgcatttgttgttgatccgtttggtattgatgcactggatattgccaaagaactgaacattagcccgtatatcttttttccgagcaatgcatttgcactgagcctggttctgcatctgccgaaactggatgaaaccgttagctgtgaatatcgtgatctgccggaaccgattaaactgcctggttgtattaccattcatggtcgcgatttactggaaccggtgcaggatcgtaccagcgaactgtataaaatgtttctgagcaacaccaaacgttatcgtctggcagaaggcattattgtcaatacctttatggaactggaaggcagcgcaattaaagcactgctggaagaggaagcaaaaaatctgccgctgtttccggttggtccgattcagagcggtagcagcaatcaggttgataaaagcgaaagcgattgtctgcgttggctggataatcagccgcatggtagcgttctgtttgtttgttttggtagcggtggcaccctgagctatgatcagaccaatgaactggccctgggtttagaactgagcggtcagaaatttatctgggttgttcgtaccccgaataatgaaagcgcagatgcaacctatctgagcgatcagaccctgggtaataatccgctggcatttctgcctaaaggttttgttgaacgtaccaaaggtcaaggtctggttgttccgttttgggcaccgcaggcacaggttctgagccatggtagcaccggtggttttctgacccattgtggttggaatagcaccctggaaagcattatgcagggtattccgctgattgtttggcctctgtttgccgaacagaaaatgaatgcagccctgctggccgaagatctgaaagttgcactgcgtccgaaaaccaataaaaacggtcgtattgatcgtgaagagatcaccaaagttgttaaaggtctgatggttggtgaagagggtaaaaaagttcgtaatcgcatgaaggacattaaaatcgcagcagaaaaagcactgagtgcagatggtagcagtaccaaagcgctgagcaaactggcaacccagtggaaaaatcatagcgatttttaa

SEQ ID NO: 43 - DNA, 1407 bp, Artificial
  Artificial sequence
atggaacagaagccacatattgccttgttgccatctccaggtatgggtcatttggttccattggttgaattggctaagctgttgttgttgcatcatgatttccatattacctgcatcatcccagttttgggttctccatctaaagctatgaaggctgttttacaagctttgccaacctccattgatcatgtttttttgccaccagtcatcttggaagaagaagaaatcaaaggtttgaagttggaagtccaagctatgttgactttgactagatctttaccaccattgagggatgttttgaagtctactagattctccgctttcgttgttgatccatttggtattgatgctctggatatcgccaaagagttgaacatttctccctacattttcttcccatctaacgcttttgctctgtctttggttttacacttgccaaagttggacgaaactgtttcttgtgagtatagagatttgccagagccaatcaaattgccaggttgtattactatccatggtagggatttgttggaaccagttcaagatagaacttccgagttgtacaagatgttcttgtctaacaccaagagatacagattggccgaaggtattatcgttaacaccttcatggaattggaaggttctgctattaaggccttgttggaagaggaagctaagaatttgccattatttccagttggtccaatccagtctggttcctctaatcaagttgataagtctgaatccgattgcttgagatggttggataatcaaccacatggttccgttttgttcgtttgttttggttctggtggtactttgtcctacgatcaaactaacgaattggccttgggtttagaattgtctggtcaaaagttcatctgggttgttagaactccaaacaacgaatctgctgatgctacttacttgtctgatcaaactttgggtaacaaccctttggcttttttgcctaagggtttcgtcgaaagaacaaaaggtcaaggtttggttgttccattctgggctccacaagctcaagttttgtctcatggttctactggtggtttcttgactcattgtggttggaattctaccttggaatccattatgcaaggtatcccattgatcgtttggcctttgtttgctgaacaaaagatgaatgctgctttgttggcagaagatttgaaagttgctttgaggccaaagactaacaagaacggtagaatcgacagagaagaaattaccaaggttgtcaagggtttgatggttggtgaagaaggtaaaaaggtcagaaacagaatgaaggatattaagattgctgccgagaaagctttgtcagctgatggttcttctactaaggctttatctaagttggctacccaatggaagaatcactctgatttctga

SEQ ID NO: 44 - DNA, 1407 bp, Quercus suber
atggaacagaaaccgcatattgcactgctgccgagtcctggtatgggtcatctgattccgctggttgaatttgcaaaacagtttgtgctgcatcacgattttcgtattacctgtattgttccggttctgggtagcccgagcaaagcaatgaaagcagttctgcaggcactgccgaccaccattgatcatgtttttctgcctccggttaaactggaagaagaagaaattcgcggtctgaaatttgaagttcagaccattctgaccctgacacgtagcctgcctccgctgcgtgaagttctgaaaagcacccgttttagcgcatttgttgttgatccgtttggtattgatgcactggatattgccaaagaactgaacattagcccgtatatcttttttccgaccaatgcatttgcactgagcctgatttttcatctgccgaaactggataaaaccgtgagctgtgaatatcgtgatctgccggaaccgctgaaactgcctggttgtattccgattcatggtcgcgatctgagcgaaccggtgcaggatcgtaccagcgaactgtataaaatgtttctgcgtaatgccaaacgttttcgtctggcagaaggcattattgtcaatacctttatggaactggaacgcagcgcaattaaagcactgctggatgaagaagcaaaaaatctgccgctgtatccgattggtccgattcagagcggtagcagcaatcaggttgataaaagcgaaagcgattgtctgcgttggctggaaaatcagccgcatggtagcgttctgtttgtttgttttggtagcggtggcaccctgagctatgatcagaccaatgaactggcactgggtttagaactgagtggtcagaaattcctgtgggttgttcgtaccccgaataatgaaagcgcagatgcagcatatctgtcagatcagaccctggataataatccgctggcatttctgcctaaaggttttgttgaacgtaccgaaggtcaaggtctggcagttccgagctgggcaccgcaggcacaggttctgagccatggtagcaccggtggttttctgacccattgtggttggaatagcattctggaaagcgttatgcagggtattccgctgattgcatggcctctgtatgcagaacagaaaatgaatgccgttctgctggccgaagatctgaaagttgcactgcgtccgaaaaccaataaaaacggtctgattgatcgtgaagaaatcgccaaagttgttaaaggtctgatggttggtgaagagggtaaaaaagttcgtaatcgcatgaaggacattaaaatcgcagcagttaaagccctgagtgcagatggtagcagtaccaaagcactgtcagaactggcaagccagtggaaaaatcatccgggtttttaa

SEQ ID NO: 45 - DNA, 1407 bp, Artificial
  Artificial sequence
atggaacagaagccacatattgccttgttgccatctccaggtatgggtcatttgattccattggttgaattcgctaagcaattcgtcttgcatcacgatttcagaattacctgtatcgttccagttttgggttctccatctaaagctatgaaggctgttttacaagctttgccaactaccatcgatcatgtttttttgccaccagtcaagttggaagaagaagaaattagaggtttgaagttcgaagtccaaaccattttgactttgaccagatctttaccaccattgagagaagttttgaagtccactagattctccgcttttgttgttgatccattcggtattgatgctctggatattgccaaagagttgaacatctctccctacatttttttcccaactaacgctttcgccctgtccttgatttttcatttgccaaagttggacaagaccgtttcttgtgagtatagagatttgccagaaccattgaaattgccaggttgcattccaattcatggtagagacttgtctgaaccagttcaagatagaacttctgagctgtacaagatgttcttgagaaacgctaagagattcagattggccgaaggtattatcgttaacaccttcatggaattggaaaggtctgctattaaggccttgttagatgaagaagctaagaacttgccactgtatccaattggtccaattcaatccggttcctctaatcaagttgacaagtctgaatctgattgcttgaggtggttggaaaatcaaccacatggttctgttttgttcgtttgttttggttctggtggcactttgtcttacgatcaaactaacgaattggccttgggtttagaattgtccggtcaaaagtttttgtgggttgttagaactccaaacaacgaatctgctgatgctgcttatttgtctgatcaaaccttggacaacaatcctttggcttttttgcctaagggtttcgttgaaagaactgaaggtcaaggtttggctgttccatcttgggctccacaagctcaagttttgtctcatggttctactggtggtttcttgactcattgcggttggaattctattttggaatccgttatgcaaggcattccattgattgcatggccattatacgctgaacaaaagatgaatgcagttttgttggctgaggatttgaaagttgctttgaggccaaagactaacaagaacggtttgatcgatagagaagaaatcgccaaggttgttaagggtttgatggttggtgaagaaggtaaaaaggtcagaaacagaatgaaggatattaagattgctgccgtcaaggctttgtcagctgatggttcttctacaaaagctttgtctgaattggcttcccaatggaaaaatcatccaggtttctga

SEQ ID NO: 46 - DNA, 1413 bp, Quercus suber
atggatcagaaaccgcatattgcactgctgccgagtcctggtatgggtcatctgattccgctggttgaatttgcaaaactgctgctgcatcatcatggctttcatattacctgtattattccgaccaccggtagtccgagcaaagcaatgaaagaagttctgcaggcactgccgaccagcattgaacatgtttttctgcctccggttaatctggaagatctgaaaggtgcaaaaccgggtctgcagattgcactgaccatgacacgtagcgttccgagcctgcgtgatgttctgaccagcctggttgcaacaacccgtctggttgcactggttgttgatccgtttgcaattgatgccctggatgttgcaaaagaactgaatgttagcccgtatatcttttatccggcaaatgcaatggttctgagcctgctgctgaatctgccgaaactggatgaaaccgttagctgtgaatatcgtgatctgccggaaccggttaaactgcctggttgtattccgattcatggtcgcgatctgattgatccgattcaggatcgtaccagcgaatggtataaactgattctgcgttgggcaaaacaaatgcgtctggcagaaggtattatcgtcaatacctttatggaactggatggcaatgcaattaccgcactggaagaagaagcaaaaaatctgagtctgtataccgtgggtccgattattcagagcggtagcagcaatcaggttgaaggtagcgattgcctgcgttggctgaataaccagccgagcggtagtgttctgtttgtttgctttggtagcggtggcaccctgagctatgatcagatgaatgaactggcactgggtttagaactgagcaaacagaaattcctgtgggttgttcgtagcccgaataatggtctggcaaatgccgcatatctggcagatcagaccctggataataatccgctggcatttctgcctaaaggttttattgaacgcaccaaagaacaaggtctggttgttccgtattgggcaccgcaggcacaggtgctgagccatggtagcaccggtggttttctgagccattgtggttggaatagcaccctggaaagcattatgcatggtatcccgattattgcatggcctctgtttgcagaacagcgtatgaatgcagttctgctgaccgaagatttaaaagttgcactgcgtccgaaagccaatgaaaaaggcctggttgatcgtgaagaaattgccaaagttattaaaggtctgatggtgggtgaagagggtaaaaaagttcatagccgtatgaaagagctgaaaatcgcagcagataaagcagtgagcccgtatggtagctcaaccaaagcactggcagatattgcaagccgttggaccaatggtccggattttcgtacctaa

SEQ ID NO: 47 - DNA, 1407 bp, Quercus lobata
atggaacagaaaccgcatattgcactgctgccgagtcctggtatgggtcatctgattccgctggttgaactggcaaaactgctgctgttacatcatgattttcacatcacctgtattattccggttctgggtagcccgagcaaagcaatgaaagcagttctgcaggcactgccgaccagcattgataatgtttttctgcctccggttatcctggaagaagaagaaattaaaggtctgaaactggaagttcaggcaatgctgaccctgacacgtagcctgcctccgctgcgtgatgttctgaaaagcacccgttttagcgcatttgttgttgatccgtttggtattgatgcactggatattgccaaagaactgaacattagcccgtacatcttttttagcagcaatgcatttgcactgagcctggttctgcatctgccgaaactggatgaaaccgttccgtgtgaatatcgtgatctgccggaaccggttaaactgcctggttgtattccgattcatggtcgcgatctgattgaaccggtgcaggatcgtaccagcgaactgtataaaatgtttctgaccaatgccaaacgttatcgtctggcagaaggcattattgtcaatacctttatggaactggaaggcagcgcaattaaagcaatgctggaagaggaagcaaaaaatctgccgctgtttccggttggtccgattcagagcggtagcagtaatcaggttgataaactggaaagcgattgtctgagctggctggataatcagccgcatggtagcgttctgtttgtttgttttggtagcggtggcaccctgagctatgaacagaccaatgaactggccctgggtttagaactgagcggtcagaaatttatctgggttgttcgtaccccgaataatgaaagcgcagatgcaacctatctgagtgatcagaatctgggtgataatccgctggcatttctgcctaaaggttttgttgaacgtaccaaaggtcaaggtctggttgttccgctgtgggcaccgcaggcacaggttctgagccatggtagcaccggtggttttctgacccattgtggttggaatagcaccctggaaagcattatgcagggtattccgctgattgtttggcctctgtttgccgaacagaaaatgaatgcagcactgctggcggaagatctgaaagttgcactgcgtccgaaaaccgataaaaatggtctgattgatcgtgaagaaatcgccaaagttgttaaaggcctgatggttggtgaagagggtaaaaaagttcataatcgcatggaagatatcaagatcgcagcagaaaaagcactgagtgcagatggtagcagcaccaaagcgctgagcaaactggcaacccagtggaaaaatcatccggatttttaa

SEQ ID NO: 48 - DNA, 1407 bp, Artificial
  Artificial sequence
atggaacagaagccacatattgccttgttgccatctccaggtatgggtcatttgattccattggttgaattggccaagctgttgttgttgcatcatgatttccatattacctgcatcatcccagttttgggttctccatctaaagctatgaaggctgttttacaagctttgccaacctccattgataacgtttttttgccaccagtcatcttggaagaagaagaaatcaaaggtttgaagttggaagtccaagctatgttgactttgactagatctttaccaccattgagggatgttttgaagtctactagattctccgctttcgttgttgatccatttggtattgatgctctggatatcgccaaagagttgaacatttccccttacattttcttctcatccaacgcttttgctctgtctttggttttacatttgccaaagttggacgaaactgttccatgtgagtatagagatttgccagaaccagttaagttgccaggttgtattccaattcatggtagagacttgatcgaaccagttcaagatagaacttctgagctgtacaagatgttcttgactaacgctaagagatacagattggccgaaggtattatcgttaacaccttcatggaattggaaggttctgctattaaggccatgttggaagaggaagctaagaatttgccattatttccagttggtccaatccagtctggttcctctaatcaagttgataagttggaatccgattgcttgtcctggttggataatcaaccacatggttctgttttgttcgtttgttttggttctggtggcactttgtcttacgaacaaactaacgaattggccttgggtttagaattgtctggtcaaaagttcatctgggttgttagaactccaaacaacgaatctgctgatgctacttacttgtccgatcaaaatttgggtgataacccattggctttcttgccaaaaggtttcgtcgaaagaacaaaaggtcaaggtttggttgttccattgtgggctccacaagctcaagttttgtctcatggttctactggtggtttcttgactcattgtggttggaattctaccttggaatccattatgcaaggtatcccattgatcgtttggcctttgtttgctgaacaaaagatgaatgctgctttgttggcagaagatttgaaagttgctttgaggccaaagactgataagaacggtttgatcgacagagaagaaattgccaaggttgttaagggtttgatggttggtgaagaaggtaaaaaggttcacaacaggatggaagatattaagattgctgctgaaaaggctttgtcagctgatggttcttctacaaaagctttgtctaagttggctacccaatggaagaatcatccagatttctga

SEQ ID NO: 49 - DNA, 1464 bp, Tanacetum cinerariifolium
atggttgcaccgaccaccgatctgcattttgttatgtttccgctgatggcacagggtcatatggttccgatggttgatattgcacgtatgctggcacagcagggtgccaccattaccattattaccacaccgctgattgcaaatcgttttcgtccggttattagccgtgcaattgaagcaaaactgcagattcagattctggaactggaactgcgtctggcagaagttggtctgccggaaggttgtgaaagctttgataccctgccgagcagcgattatattgaaaaactgtttgcagccatcgacctgctggaagaaccggcagaagaactgctgaaaggtctgtgtccgcagcctggttgtattattagcgattttctgattccgtggaccacagatgttgcacgtcgttttagcattccgcgtctggtttttaatggtccgggttgtttttggctgctgtgtatgcatgtttttagcagcagcaatatcctggaacgtattgaaagcgataccgaacgttttgttctgcctggcctgccggatcgtgttgaagttaccaaactgcaaattattggcaccagcaaagaagcaagcagctatcagaaaggttttctgtttcgtgcaattcaggcagataaaagcgcatatggtattgtggtgcatacctttaatgagctggaaccggaatatgtgaaagaatttagcaaagtgcgtgacaccaaagtgtggtgtattggtccggttagcctgctgaataatgatattggtgatattagcgagcgtggcaataaaaccgcaattaacaaccatgattgtctgcagtggctgaatgatcgtgaaccgggtagcgttctgtatgtttgtctgggtagcctggcacgtattagcacccagcaggttattgaattaggtctgggtttagaaagcaccaaccagccgtttatttggtgcgttaaaaacaaaaccgaggaactggataaatggttcctgggttttaaagaacgtgttcgtgatcgtggtctgattgttcatggttgggcaccgcagctgaccattctgagccatggtgcaattggtggttttctgacccattgtggttggaatagcgcactggaaagcatttgtgcaggtatcccgatggttacctggccgtttctgggtgatcagtttctgaatgaaaccttcattgtggaaatcctgaaaattggtgttcgcattggtgttgaaattccggtgccgtttggtgaagaagatgaaattggcgttctgctgaaaaaagaggatgttaaaatggccgttgaatgcctgatggataaagcagatgaacagggtaaacagcgtcgtaaacgtgcaagcgaactggcagaaatggcaaaacgtgccatggccgaaggtggtagcagctatgttaatgttagcagcctgattcaggatatcgaaacctttaaaacgcagcattaa

SEQ ID NO: 50 - DNA, 1464 bp, Artificial
  Artificial sequence
atggttgctccaactaccgacttgcattttgttatgtttccattgatggcccaaggtcatatggttccaatggttgatattgctagaatgttggctcaacaaggtgctaccattaccattattactaccccattgattgccaacagattcagaccagttatttccagagctattgaagccaagttgcaaatccaaatcttggaattggaattgagattggccgaagttggtttgcctgaaggttgtgaatcttttgatactttgccatcctccgactacatcgaaaagttgtttgctgctatcgacttgttggaagaaccagctgaagaattattgaagggtttgtgtccacaaccaggttgcattatttccgattttttgattccatggaccaccgatgttgctagaagattttctattccaaggttggtttttaacggtccaggttgtttttggttgttgtgcatgcatgttttctccagctctaacatcttggaaagaatcgaatctgacaccgaaagatttgttttgccaggtttgccagatagagttgaagttactaagttgcagatcatcggaacctctaaagaagcttcatcttaccaaaagggtttcttgttcagagcaattcaagctgataagtctgcttacggtatcgttgttcataccttcaatgaattggaacccgaatacgtcaaagagttctctaaagttagagataccaaggtttggtgcattggtccagtttctttgttgaacaatgatatcggtgacatctccgaaagaggtaacaaaactgctattaacaaccacgattgcttgcagtggttgaatgatagagaaccaggttctgtcttgtacgtttgtttgggttctttggctagaatctctacccaacaagttatcgaattaggtttgggtctagaatccaccaatcaaccttttatttggtgcgttaagaacaagaccgaagaattggataagtggttcttgggtttcaaagaaagagttagagacagaggtttgatcgttcatggttgggctccacaattgactattttgtctcatggtgctattggtggtttcttgactcattgtggttggaattctgccttggaatctatttgtgctggtatcccaatggttacttggccatttttgggtgatcaattcttgaacgaaaccttcatcgtcgagattttgaagatcggtgttagaatcggtgttgaaattccagttccatttggtgaagaggacgaaattggtgtcttgttgaaaaaagaggatgttaagatggccgtcgaatgcttgatggataaggctgatgaacaaggtaagcagagaagaaaaagagcttctgaattggctgaaatggctaaacgtgctatggctgaaggtggttcttcttacgttaatgtctcctcattgatccaagacatcgaaactttcaagacccaacactga

SEQ ID NO: 51 - DNA, 1476 bp, Mikania micrantha
atggcaccgagtccgcctccgaccgatctgcattttgttctgtttccgctgatggcacagggtcatctggttccgatggttgatattgcacgtattctggcacagcgtggtgcaaccgttaccattattaccacaccgaatgatgcaaatcgtattcgtccggttattagccgtgcaattgaagccaaactgaaaattctgctgctggaactgcagcctcgtctggcagaagcaggtctgccggaaggttgtgaaagctttgatcagctgccgagctttgaatattggaaaaatctgagcgcagcaattgatttactggaacagcctgccgaagatctgctgcgtgaactgtcaccgcctccggattgtattattagcgattttctgttcccgtggaccaccgatgttgcacgtcgttttaacattccgcgtctggtttttaatggtccgggttgtttttttctgctgtgtatgcatgttgccattagcagcaatattctgggtgataccgaaagcgttaatgaacgtgttgttctgcctggcctgccggatcgtattgaagttaccaaactgcagattaccggtagcagcaaagccgttaccaaagaagatatgaatagctgggttcgtgcagttgatgcagaaaaagcagcatatggtattgtggtgcatacctttaatgaactggaaccggaatacgtgaaagaatatacccgtgtgaaagaaaccaaagtttggtgcattggtccggttagcctgtgtaacaaaaatggtctggatattgcagaacgcggtaataaagcagccattaatgaacatagctgtctgaattggctggatgaacgtgaaccgggtagcgttctgtatgtttgtctgggtagcctggcacgtgtgagcagcaaacaggcaattgaattaggtctgggtcttgaaagcattaaccgtccgtttatttggtgtattcgcaacaaaaccgaagagtttgaaacctggctgagtcagggttttgtggatcgtgttcgtgatcgtggtctgattattcatggttgggcaccgcaggttctgattctgagccatcaggccattggtggttttctgacccattgtggttggaatagcaccctggaaagcgtttcagccggtgtgccgatggttacctggccgttttttgcagatcagtttctgaacgaaacctttatcgtggaaattctgaaaattggtgtgcgcattggtgttcagattccggttgtttatggtgaagaagataaagttggcgttctggtgaaaaaagaagatgtcaaaaaagccgttgagtgcctgatggaagaggatgaagatggcgaagaacgtcgtaaacgtgttatggaactggcaaaaatggccaaaattgcaatggcagaaggtggtagcagctatcagaatgttagcagcctgattcaggatatcaccaaaaccattgagaaactggacatttaa

SEQ ID NO: 52 - DNA, 1476 bp, Artificial
  Artificial sequence
atggctccatctccaccaccaactgacttgcattttgttttgtttccattgatggcccaaggtcatttggttccaatggttgatattgctagaatcttggctcaaagaggtgctaccgttactattattactactccaaacgatgccaacagaatcagaccagttatttccagagctattgaagccaagttgaagatcttgttgttggaattgcaacctagattggctgaagctggtttgcctgaaggttgtgaatcttttgatcaattgccatccttcgagtactggaagaatttgtctgctgctatcgatttgttggaacaaccagctgaagatttgctgagagaattgtcaccaccaccagattgcattatctctgattttttgttcccatggactaccgatgttgctagaagattcaatatcccaaggttggtttttaatggtccaggttgtttcttcctgttgtgtatgcatgttgccatctcttctaacattttgggtgataccgaatccgttaacgaaagagttgttttgccaggtttgccagatagaattgaagttaccaagttgcaaatcaccggttcttctaaagctgtcaccaaagaagatatgaactcttgggttagagctgttgatgctgaaaaagctgcttatggtatcgttgttcataccttcaatgaattggaacccgaatacgtcaaagagtacactagagtcaaagaaactaaggtttggtgcattggtccagtgtctttgtgtaacaaaaacggtttggatattgccgaaagaggtaacaaagctgccattaacgaacattcttgtttgaactggttggacgaaagagaaccaggttctgtcttgtatgtttgtttgggttctttggccagagtttcttctaagcaagcaatcgaattaggtttgggtctagaatccattaacagaccattcatctggtgcattagaaacaagaccgaagaattcgaaacctggttgtctcaaggtttcgttgatagagttagagacagaggtttgattattcatggttgggctccacaagtcttgatcttgtctcatcaagctattggtggtttcttgactcattgtggttggaactctactttggaatctgtttctgctggtgttcctatggttacttggccattttttgctgaccaattcttgaacgaaactttcatcgtcgagatcttgaagatcggtgttagaattggtgttcaaatcccagttgtttatggtgaagaagataaggttggcgtcttggtcaaaaaagaggatgttaagaaagccgtcgaatgcttgatggaagaggatgaagatggtgaggaaagacgtaaaagagttatggaattggctaagatggccaagattgctatggcagaaggtggttcttcttaccaaaacgtttcctcattgatccaagatatcaccaagaccatcgaaaagttggacatctga

SEQ ID NO: 53 - DNA, 1485 bp, Artemisia annua
atggttgcaccgagcaccgaactgcattttgttatgtttccgctgatggcacagggtcatattgttccgatggttgatattgcacgtattctggcagaaaaaggtgcaaccgttaccatttttgcaacaccgctggttgcaaatcgttttcgtccggttattagccgtgcaattgaagccaaactgaaaattcagattctggaactggaactgcaggttgcaaaagttggtctgccggaaggttgtcagagctttgaaaaactgccgagcagcgatagcagcgcaaaactgtttgcagcaatggatctgctggaacagcctgcagaagatctggttcgtaaactgagtccgcctccggattgtattattagcgattttctgtttccgtggaccaccgatatggcacgtcgttttaacattccgcgtctggtttttcatggtccgggttgtttttggctggtttgtatgcatgcagtttttagcagcgacaaattcaaaaccatcaagctggaagagaaatttatgctgcctggcctgccggatcaggttgaagttaccaaactgcagattaccggcaccaaagaaattaaaccggaacaaatgggtttttgggttcgtgcaaccgaagccgaaaaagcagcatatggcaccgttgttcataccttttatgagctggaaccggaatatgtgaaagaatacagcaaagtgaaagacaccaaagtgtggtgtattggtccggttgcgctgagcaataaagcaaatctggatattgcagaacgcggtaataaagcagccattaatgaacatgattgcctgaaatggctggatgaaaaagaaccgggtagcgttttttatgtttgtctgggtagcattacccgtctgagtaccgaacaggcaattgaaattgcactgggtttagaaagcaccaatcagccgtttctgtggtttctgcgtaataaaacccaagagctggaaaaatggtttagcgaagtgggttttgaagaacgtgttaaagatcgtggtctgattgttcatggttgggcaccgcagattctgattctgagccattgtgcagttggtggttttctgacccattgcggttggaatagcaccctggaaggtgttagctttggtgtgccgatggttacctggcctcattttgcagatcagtttctgaacgaaaccttcattgtggaaattctgaaaattggtgtgcgcattggtgttgatattccggaactgtatggtgaagaagataaactggaagccctggtgaaaaaagaagatgttaaacgcgcagttgaatgcctgatggataaagaggacaaagaagcaaaacagcgtcgtaaacgtgcccgtaaactggccgaaatggcaaaacgtgcaatggccgaaggtggtagcagctatgttaatgttagcagcctgattcaggatatcaccgaatttcgtaatacccagcagctgaatcatctgcatgtttaa

SEQ ID NO: 54 - DNA, 1485 bp, Artificial
  Artificial sequence
atggttgctccatctaccgaattgcactttgttatgtttccattgatggcccaaggtcatatagttccaatggttgatattgccagaatcttggctgaaaaaggtgctactgttactattttcgctactccattggttgccaatagattcagaccagttatttccagagctatcgaagccaagttgaagatccaaatcttggaattggaattgcaagttgccaaagttggtttgccagaaggttgtcaatctttcgaaaagttgccatcctctgattcttccgctaagttgtttgctgctatggatttgttggaacaaccagctgaagatttggtcagaaaattgtctccaccaccagattgcattatctccgattttttgtttccatggactaccgatatggccagaagattcaatattccaaggttggtttttcatggtccaggttgtttttggttggtatgtatgcatgctgttttcagctctgataagttcaagaccattaagctggaagagaagtttatgttgccaggtttaccagatcaagtcgaagttaccaagttgcaaattaccggtacgaaagaaatcaagccagaacaaatgggtttttgggttagagctactgaagcagaaaaagctgcttatggtactgttgttcataccttctatgaattggaacccgaatacgtcaaagagtactcaaaagttaaggataccaaggtttggtgcattggtccagttgctttatctaacaaggccaacttggatattgctgaaagaggtaacaaagccgccattaacgaacatgattgcttgaaatggttggacgaaaaagaaccaggttccgttttttacgtttgcttgggttctattaccaggttgtctactgaacaagctattgaaattgccttgggtctagaatctaccaatcaaccttttttgtggttcttgaggaacaagacccaagaattggaaaagtggttttctgaagtcggtttcgaagaaagagtcaaggatagaggtttgatagttcatggttgggctccacaaattttgatcttgtctcattgtgctgttggtggttttttgactcattgtggttggaactctactttggaaggtgtttcttttggtgtcccaatggttacttggccacattttgctgatcaattcttgaacgaaaccttcatcgtcgagattttgaagatcggtgttagaatcggtgttgatattcctgagttgtatggtgaagaagataagttggaagccttggttaagaaagaagatgttaagagggctgtcgaatgcttgatggacaaagaggataaggaagctaagcaaagaagaaaaagagctagaaagttggccgaaatggctaaacgtgctatggctgaaggtggttcttcttacgttaatgtctcctcattgatccaagacatcactgagtttagaaacacccaacaattgaaccacttgcacgtttga

SEQ ID NO: 55 - DNA, 1485 bp, Artemisia annua
atggttgcaccgagcaccgaactgcattttgttatgtttccgctgatggcacagggtcatattgttccgatggttgatattgcacgtattctggcagaaaaaggtgcaaccgttaccatttttgcaacaccgctggttgcaaatcgttttcgtccggttattagccgtgcaattgaagccaaactgaaaattcagattctggaactggaactgcaggttgcaaaagttggtctgccggaaggttgtcagagctttgaaaaactgccgagcagcgatagcagcgcaaaactgtttgcagcaatggatctgctggaacagcctgcagaagatctggttcgtaaactgagtccgcctccggattgtattattagcgattttctgtttccgtggaccaccgatatggcacgtcgttttaacattccgcgtctggtttttcatggtccgggttgtttttggctggtttgtatgcatgcagtttttagcagcgacaaattcaaaaccatcaagctggaagagaaatttatgctgcctggcctgccggatcaggttgaagttaccaaactgcagattaccggcaccaaagaaattaaaccggaacaaatgggtttttgggttcgtgcaaccgaagccgaaaaagcagcatatggcaccgttgttcataccttttatgagctggaaccggaatatgtgaaagaatacagcaaagtgaaagacaccaaagtgtggtgtattggtccggttgcgctgagcaataaagcaaatctggatattgcagaacgcggtaataaagcagccattaatgaacatgattgcctgaaatggctggatgaaaaagaaccgggtagcgttttttatgtttgtctgggtagcattacccgtctgagtaccgaacaggcaattgaaattgcactgggtttagaaagcaccaatcagccgtttctgtggtttctgcgtaataaaacccaagagctggaaaaatggtttagcgaagtgggttttgaagaacgtgttaaagatcgtggtctgattgttcatggttgggcaccgcagattctgattctgagccattgtgcagttggtggttttctgacccattgcggttggaatagcaccctggaaggtgttagctttggtgtgccgatggttacctggcctcattttgcagatcagtttctgaacgaaaccttcattgtggaaattctgaaaattggtgtgcgcattggtgttgatattccggaactgtatggtgaagaagataaactggaagccctggtgaaaaaagaagatgttaaacgcgcagttgaatgcctgatggataaagaggacaaagaagcaaaacagcgtcgtaaacgtgcccgtaaactggccgaaatggcaaaacgtgcaatggccgaaggtggtagcagctatgttaatgttagcagcctgattcaggatatcaccgaatttcgtaatacccagcgtctgaatcgtctgcatgtttaa

SEQ ID NO: 56 - DNA, 1488 bp, Stevia rebaudiana
atgtcgccaaaaatggtggcaccaccaaccaaccttcattttgttttgtttcctcttatggctcaaggccatctggtacccatggtcgacatcgctcgaatcttagcccaacgtggtgcaacggtcaccataatcaccacaccctaccatgccaaccgggtcagaccggttatctcccgagccatcgcgaccaatctcaagatccagctactcgaactccaactgcggtcaaccgaagccggtttacccgaagggtgcgaaagcttcgaccaacttccgtcattcgagtactggaaaaatatttcaaccgctatcgatttgttacaacaacccgctgaagatttgctccgagaactttcaccaccacccgattgcatcatatcggactttttgttcccgtggaccaccgatgtggctcgacggttaaacatcccccggctcgtgttcaatggaccgggctgcttttatctcttgtgcatccatgttgcgatcacttccaacattttgggagagaatgaaccggtcagtagtaataccgagcgcgttgtgctgcccggtttacctgaccggatcgaagtcactaaacttcagatcgtcggttcgtcgagaccagccaacgtagacgaaatgggctcgtggcttcgagccgtagaagctgagaaagcttcattcgggatagtggttaatactttcgaagagcttgaaccggagtacgttgaagaatacaaaacggttaaagataagaagatgtggtgtatcggcccggtttcgttatgcaacaaaaccgggccggatttagccgagcgaggaaacaaagctgcaataaccgaacacaactgcttaaaatggctcgatgagagaaaactggggtccgtgttatacgtttgtttaggtagccttgcacgcatttctgccgcacaagcaatcgagctcgggttaggactcgagtccataaaccgtccctttatatggtgcgtaagaaacgaaaccgatgagctcaaaacatggtttttggatgggtttgaagaaagggttagagatcgcgggttgatcgttcatggttgggcgccacaggttttgatactgtcgcacccaaccattggcggtttcttaacccattgcggttggaactcgactattgaatcgattaccgcgggtgttccaatgatcacgtggccattttttgcggaccagtttttgaatgaagcttttatagttgaagttttgaagattggagttaggattggtgttgagagggcttgtttgtttggggaagaagataaggttggagtgttggtgaagaaggaggatgtgaagaaggctgttgaatgcttgatggatgaagatgaagatggtgatcagagaagaaagagggtgattgagcttgcaaaaatggcgaagattgcaatggcggaaggtggatcttcttatgaaaatgtatcgtcgttgattcgagatgtgactgaaacagttagagcaccacattag

SEQ ID NO: 57 - DNA, 1488 bp, Artificial
  Artificial sequence
atgtccccaaaaatggttgctccaccaactaacttgcatttcgttttgtttccattgatggcccaaggtcatttggttccaatggttgatattgctagaatcttggctcaaagaggtgctaccgttactattattactactccataccatgccaacagagttagaccagttatttctagagctattgccaccaacttgaagatccaactattggaattgcagttgagatctactgaagctggtttgcctgaaggttgtgaatcttttgatcaattgccatccttcgagtactggaagaatatttctaccgccatcgacttgttacaacaaccagctgaagatttgttgagggaattgtctccaccaccagattgcattatttccgattttttgttcccatggactaccgatgttgctagaagattgaatatcccaaggttggtttttaatggtccaggttgtttctacttgttgtgcattcatgttgccatcacctctaacattttgggtgaaaatgaacccgtttcctctaacactgaaagagttgttttgccaggtttgccagatagaattgaagttaccaagttgcaaatcgtcggttcttctagaccagctaatgttgacgaaatgggttcttggttgagagctgttgaagctgaaaaagcttctttcggtatcgttgttaacaccttcgaagaattggaacctgaatacgttgaagagtacaagaccgttaaggacaaaaagatgtggtgtattggtccagtttctttgtgtaacaaaaccggtccagatttggcagaaagaggtaacaaagctgctattaccgaacataactgtttgaagtggttggacgaaagaaaattgggttctgtcttgtacgtttgcttgggttctttggctagaatttctgctgctcaagctatcgaattaggtttgggtttagaatccatcaacagaccattcatttggtgcgttagaaacgaaaccgatgaattgaaaacctggttcttggatggtttcgaagaaagagttagagacagaggtttgatagttcatggttgggctccacaagttttgattttgtctcatccaacaatcggtggtttcttgactcattgtggttggaactctaccattgaatctattactgctggtgttccaatgattacttggccattttttgccgaccaattcttgaatgaagccttcatcgttgaggttttgaagatcggtgttagaatcggtgttgaaagggcttgtttgtttggtgaagaagataaggttggcgtcttggtcaaaaaagaggatgttaagaaagccgtcgaatgcttgatggatgaagatgaggatggtgatcagagaagaaaaagagttattgagttggctaagatggccaagattgctatggctgaaggtggttcttcttacgaaaatgtctccagcttgattagagatgttactgaaactgttagagccccacattga

SEQ ID NO: 58 - DNA, 1476 bp, Lactuca sativa
atgaaaatggttgcaccggtgacagattttcatgttgtgatgtttccgctgatggcacagggtcatatggttccgatggttgatattgcacgtattctggcactgcgtggtgcaatggttaccatttttaccacaccgctggttgcaaatcgttttcgtcaggttattgaacgtgccaatgaaagcaaactgatgatcaaactgctggaactgcatctgcagctggcagaagttggtctgccggaaggttgtgaaagctttgataccctgccgagctttgaaagcagcaataaactgtttgcagccattaacctgttagaacagcctgcagaaaatctgctgcgtgaactgagtccgcctccgagctgtattattagcgatttttgttttccgtggaccggtgatgttgcacagcgtctgaatattccgcgtctggtttttcatggtccgggttgtttttggctgctgagcatgcatgttgttctgaccagcaaaatgctggataccattgaaagcaatagcgaacgttttgttctgagtggcctgccggatcgtgttgaatttaccaaaccgcagctgaccggtagttttaaagcacgtaccgcagatcagatggaattttggagccgtgcagccgcagcagaaaaaaccgcatatggtattgttgtgcacacctttgaagaactggaaccggaatatgtgaaagaactgaaaaaagtgaaggataccaagatctggtgtattggtccggttagcctgtgcaataaagataattcagatattgccgagcgtggcaataaagccaccattaatgaacatgattgtctgaaatggctggatgcacgtgaaccgggtagcgttgtttatgtttgtctgggtagtctgacccgtgcaagcacccagcagagcattgaattaggtctgggtttagaaagtaccaacaaaccgtttatttggtgcgttcgtgataaaaccgaggaactggaaaaatggtttagcgaagagggttttgaggaacgtgttagcgatcgtggtctgattgttcatggttgggcaccgcaggttctgattctgagccatcgtgcagttggtggttttctgacccattgtggttggaatagcaccctggaagcagtttgtgccggtgttcagatggttacctggcctcattttgcagatcagtttattaacgaagcctttatcgtggaaatcctgaaaattggtgttcgcattggtgttgatatcccggttccgtttggtgaagaggataaaatggaagtgctggtgaaaaaagaagatgttaaacgcgcagttgaatgcctgatggatgaaggtgaagaaggtaaagaacgtcgtaaacgtgtgagcgaactggcagaaatggcaaaacgtgcaatggaagaaggtggtagcagctatctgaatgttagcagcctggttcagcatctgaccgatatgcagctgaaaacccgttaa

SEQ ID NO: 59 - DNA, 1476 bp, Artificial
  Artificial sequence
atgaagatggttgctccagttaccgatttccatgttgttatgtttccattgatggcccaaggtcatatggttccaatggttgatattgctagaatcttggctttgagaggtgctatggttactattttcactactccattggttgccaacagattcagacaagttattgaaagagccaacgagtccaagttgatgatcaagttgttggaattgcacttgcaattggctgaagttggtttgcctgaaggttgtgaatcttttgatactctgccatccttcgagtcatctaacaagttgtttgctgccattaacttgttggaacaaccagctgaaaacctgttgagagaattgtctccaccaccatcttgcattatttctgatttttgtttcccatggaccggtgatgttgctcaaagattgaatattccaaggttggtttttcatggtccaggttgtttttggttgttgtccatgcatgttgttctgacctctaaaatgttggacaccatcgaatctaactccgaaagatttgttttgtccggtttgccagatagagttgaattcacaaaaccacaattgaccggttctttcaaagctagaactgctgatcaaatggaattctggtctagagctgctgctgcagaaaaaactgcttatggtatagttgttcacaccttcgaagaattggaacccgaatatgtcaaagagttgaagaaggttaaggacaccaagatttggtgcattggtccagtttctttgtgcaacaaggataactcagatattgccgaaagaggtaacaaggctaccattaacgaacatgattgcttgaaatggttggatgctagagaaccaggttctgttgtttacgtttgtttgggttctttgactagagcttctacccaacaatccatcgaattaggtttgggtttagagtctaccaacaagccattcatttggtgcgttagagataagactgaagagttggaaaagtggttctctgaagagggttttgaagaaagagtttccgatagaggtttgatcgttcatggttgggctccacaagttttgattttgtctcatagagctgttggtggtttcttgactcattgtggttggaattctactttggaagctgtttgtgctggtgttcaaatggttacttggccacatttcgctgatcaattcatcaatgaagccttcatcgtcgagattttgaagatcggtgttagaatcggtgttgatattccagttccatttggtgaagaggataagatggaagtcttggttaagaaagaagatgttaagagggctgtcgaatgcttgatggatgaaggtgaggaaggtaaagaacgtagaaagagagtttctgaattggccgaaatggctaaacgtgctatggaagaaggtggttcttcttacttgaacgtttcctctttggttcaacacttgaccgacatgcaattgaaaaccagatga

SEQ ID NO: 60 - DNA, 1491 bp, Lactuca sativa
atggcaagcccgagcagcgatctgcattttattctgtttccgctgatggcacagggtcatatgattccgatggttgatattgcacgtatgctggcacagcgtgatgttcatgttaccattattaccacaccgctgaatgccaatcgttataaaagcgttaccgatcgtgccattaaaagcaacctgaaaattcaggtgctggaactgaaactgccgctggcagaagttggtctgccggaaggttgtgaatcatttgatctgattccgagcaccgcactggttgttaaattctttgatgcaattgccatgctggaagaaccgaccgaaagcatgctgcgtcgtctgacaccggcaccgagctgcattattagcgatagcggtctgccgtggaccaccggtctggcaaaacgtctgaatattccgcgtctggttttttatggtccgggttgttatacctatctgtgcattcatattgttgcgaatacccgtattctggacgaaatcaaaagcgacagcgaatattttgttctgcctggcctgccggatcgtattgaagttaccaaaccgcaggcaagcgattggccgaaacgtgatagcaaagatcgtctggaaatgtttgaacgcattgaagaagcaggtaaagcagcctatggtattgtggttaatagctttgatgaactggaaccgaaatacgtggaagaatttgcaaaagccaaagataaaaaggtgtggtgtattggtccggttagcctgtgtaatcgtagctttctggatgttgcagaacgtggtagtaaagccagcattaatgaacatgattgtctgaaatggctggatctgcgtgaaccgggtagcgttgtttatgtttgtctgggtagcctgagctatgcatgtaccgaacaggttattgaattaggtctgggtttagagctgagcaacaaaccgtttatttggtttattcgcgaaaccaacgaagaactgaagcgttggctgttagaagaggcatatgaagaacgtattaaagatcgtggtctgatggtttttggttgggcaccgcagattctgattctgagccatgcagcagttggtggttttattacccattgtggttggaatagcaccctggaaggtattagcgcaggtatcccgatggttacctggcctcattttgcagatcagtttctgaatgaacgctttattaccgacgtgctgaaaattggtgttcgtattggtgcagaagtgccggttagttttggtgaacgtgataatctgaaagtgatggtgaaacgcgaagatgttaaaattgcagttgaaggcctgatgaacgatgatgatgaaggtatggcacgtcgtaaacgtgcaaaagaactgggtgaaatggccaaacgtgccatggaagaaggtggtagcagccataataacatgaccagcatgattcaggcaattaccgaagaagttgccaaaaacaataaaccggttcagggcatcatgtaa

SEQ ID NO: 61 - protein, 487 aa, Eucommia ulmoides
MEETTMTNTNRVELVFIPSPGMGHLVSAVEMAKLLVDRDQRLSITLLIMKAPFKTKANYSPAQSLSTAAASRIRFVDLPGDELESDAKFSPHTFLSGFISGQKTLVRDAVAQISSSPEAPRLAGFFIDMFCTSMIDVADEFRVPTYVFFTSGAAFLGLVFHLQTMRDDHNHDVTELKDSDADLLVPCFVKSVPTKVLPSVVLDKEGGSEMFHDLVRRIRETKGILINTFSELESHAIHSINTPPVYPVGPILNVAGDNDNESTSAAAILKWLDDQPPSSVVFLCFGSMGCFGVDQVNEIAHALERSGHRFLWSLRRPPPEGKLEFPGDYTNLEEVLPERFLERTAEIGRVIGWAPQAAVLAHRAVGGFVSHCGWNSTLESVWYGVPMAAWPQYAEQQLNAFLMVEELEMAVEIKMDYRNGFYSKSGVALRSEEIEKGIRRLMECGENGMRKKVEEMREKSRVAVREGGSSYLSIGRLIEDVMKIVEQ

SEQ ID NO: 62 - protein, 476 aa, Panax ginseng
MGAELILIPSPGVGHLVSTVEIAKLLISRDERLSITVLVMKFSHDTGVTAYTRSLQKDAPNRIVFVDLPQNESLISSPKSFFTSFIESQTSPVRDSVRQIVSRSDSNKLAGFVIDMFCTPMIDVANEFGVPTYVFFTSGAAFLGLQFYHLSLSDEHNQDLTEYKDTDVELSIPSFINPVPAKVLPSVILNKEGSTMLQSISRRFKEAKAILVNTFAELEPHAIKALGDNCKIPPIYPVGPIINLKNKEGTTQNHSSEDGIISWLDNQPPSSVVFLCFGSFGSFDEGQVREIANGLEQSGQRFLWSLRRRPEKMELPKDYENPEEVLPEGFIERTSGMGKVIGWAPQTAILSHPAVGGFVSHCGWNSTLESIWCGVPMATWPIYAEQQINAFELVKELGMAVEIKMDYREDYIFAPENNLVVTADQIEKGMRCLMMDGESEMRKKVEEMKEKSRMAMVKGGSSYISLGHFIEDVMRN

SEQ ID NO: 63 - protein, 473 aa, Carthamus tinctorius
MTNSELVFIPSPGAGHLPPTVELAKLLLRRHHRLSITIIIMKAPFGGGAYDTAKLDSTPRLRCVEIPSDDSTAALISPTAFLTAFIDHHKPHVRNIVRESIADPGGTVRLAGFVVDMFCVDMVDVANEFGAPTYAYFTSGAAMLGLMFHLQAKRDDDNLDVTELDKNSRSVISVPSYINPVPVNVLLDVLFDKNGAKMFLDLAKRFRETKGIIVNSFRELESHAIEVLSDDPDIPPVFPVGPILNLNSTTDDGKVDDIMTWLDEQPERSVVFLCFGSMGTFPEEQIREIASAIESGGHRFLWSLRRPSSKEKMESPKEYEDPGEVLPEGFLERTSGVGRVIGWAPQLMVLSHRSVGSFVSHCGWNSTLESIWCGVPIAAWPMYAEQQTNAFQLVSEAGIAAEVRMDYRTNMKPGGEQMIVTAEEIERGIRRVMSDGEIKRKAEEMKEKSRLAVSEGGSSYDSIGDFIHHVMNE

SEQ ID NO: 64 - protein, 479 aa, Camellia fraterna
MSKAQLVFIPSPGIGHIVSTVEMAKLLVGRDDRLSITVLVMKFPFDNKGTSYTQSLSSDRIRFLDLFHDTPSTADPNSKIFGSFLFDYIESHKPRVRDVVSETVSKSESESTPRLAGFVIDMFCTPMIDVANEFGVPTYVFFTSSAAFLGLMFHIDTLQQDITELEDSDAELNVPAYANPVPAKFLPSVLFDKEGGSMFLNIAKRWRETKGIIVNTFTELEFRALKSLQEDHTNPQMYPVGPVLNLKGGSPNEAQNSQSEADIMRWLDEQDPSSVVFLCFGSRGSFDGDQVKEIAHSLESSGHRFLWSLRQPPPKGKIGLPEEYENLTDILPEGFLDRTAEIGKVIGWAPQVAVLSHRAVGGFVSHCGWNSTLESLWCGVPVATWPMYAEQQMNAFQLVREFGMAVEIKMDYRNDYLMKKMPVMVTADEISSGIRQLMDGSDEIKHKVKKISEKSRVAVMEGGSSYNSLGCFIEDVIQG

SEQ ID NO: 65 - protein, 469 aa, Forsythia x intermedia
MAETKKSELVFIPVPGVGHLISTIEMAELLTDRDERLSITVIIMKLPMESKTDFYSRKSNSRIRFIEFSLNQPITPNNFVTHFIESHKDPIRDAVTKIVRDESNSIRLAGFVIDMFCTTMIDVANEFGVPTYVFFTTTAALLGFTFYLQSRSDEQKLDVTEYKNSNAELLIPTYINPVPANVFPSRFFDKDGLAMFLGMARRFRETKGIMINTFLDLEAHAMKSLSDDHTIPPVYSIGPIIHVTAENDDDNKDYDEIIKWLHEQPVSSVVFLCFGSMGFFDDEQVKEIAVALEKSGHRFLWSLRKPPPKDRFEYPSDYENLEEILPEGFLQRTAGIGKVIGWAPQVAVLSHHSVGGFVSHCGWNSTLESVWCGVPIAAWPMYAEQQTNAFELVKDLGIAVEIKMDYRRGSDVIVKAEEIEKGIRHLMEPDSEMRNKMKQMKNKSRLALMEGGSSYDFLRHFIDNIPMTD

SEQ ID NO: 66 - protein, 474 aa, Tanacetum cinerariifolium
MKTSELVFVPSPGAGHLPPTVELAKLLLDRDDHLSITIIIMKLYMGAKHDTGTPISTDRLRYIDIPCDESTMALITPETFLATFVEYNKTHVRNIVRENIIESNSVRLAAFVLDTFCMGMADVANEFGVPTYNYFTSGASMLGLMFDLQAKRDEEGHDVTELKDSGLELSIPSFVNPVPAKVLPEVVLDNKGRAKMFLDLAKRFRETKGIIINSFQELESHGVEYLLSSNANIPPVFPVGPILNLSKAKNDSKTEEIMTWLNDQPESSVVFLCFGSMGSFNEKQVKEIAIALERSGHRFLWSLRRPQPKGKMEHPKEYENPEEVLPEGFIERTSSVGKVIGWAPQTAVLSHPSVGGFVSHCGWNSTLESIWCGVPIAAWPLYAEQQINAFQLVVELGIAAEIRMDYRSDMRRGINNMTVAAEEIEEGIRRLMNDHEMRNKVKEMKEKSRAAVVEGGSSYASIGKFIEHVSNVTI

SEQ ID NO: 67 - protein, 473 aa, Tanacetum cinerariifolium
MKTSELVFIPSPGAGHLPPTVELAKLLLDRDDQLSVTIIIMQLFVGAKHDTGTPVSTDRLRYIDIPCDESTMALITPETFLFTFVEQNKTHVRNIVRENVIESNSVRLAAFVLDMFCMGMVDVANEFGVPTYNYFTSSASMLGLMFDLQAKRDEEGHDVTELKDSGLELSIQSFVNPVPAKVLPGVVLDNKGGAKMFLDLAKRFRETKGIIINSFQELESHGVEYLLRRNANIPPVFPVGPILNLSKPKINDSKTEEIMMWLNDQPESSVVFLCFGSMGSFNEKQVMEIAIALERSGHRFLWSLRRPQPKGKMEHPKEYENPEEVLPQGFIERTSSVGKVIGWAPQTAVLSHPSVGGFVSHCGWNSTLESIWCGVPIAAWPLYAEQQINAFQLVMELGIAAEIRMDYRGDMRRGINNMTVAAEEIEDGIRRLMNDHEMRNKVKQIKEKSRFAVLEGGSSYAYIGRFIHHLNSI

SEQ ID NO: 68 - protein, 505 aa, Nyssa sinensis
MKETEMVFIPSPGIGHLIATVELVKLLINRDERLSITVLIMKLPDDSTPTSSASAYGSDTSRIRFVHLPTRTPTQVDSEPPKSLRHFLFDFIDSHKTHVRDVVADITRSHSVRLAGVFIDMFCTPMIDVANEFGVPSFVFFTSGAAFLGLMFHLQSLQDHQNQDITEFHDSDAELLVPTFTNPVPAKLLPSVVLDKGGSCTLFLAIARKFRETKGILVNTFAELESHAIKSFSTLSSDGDDNIPPIYPVGPILNIKEGGGGGEVTHNNQEQYDAIMSWLDDQPPSSVVFLCFGSKGCFGDNQVKEIAHALESSGHRFLWSLRRPPPKGSVDLPHDYSNPEDVLPEGFLERTVGKGMGKVIGWAPQAAVLSHPAVGGFVSHCGWNSTLESIWCGVPVATWPLYAEQQMNAFELVRELGLAVELKLDYRRDFFWSSDEVGLLTAEEIESGIRQVMMDGEIRKKVKEMKEKSRVAMMEGGSSYVSLGRMIEDLIHDAPQNIQTPPPGL

SEQ ID NO: 69 - protein, 473 aa, Mikania micrantha
MLISELVFIPSPGAGHLPPTLELAKLLLQRDQRLSATIIIMNVSFGPKQNTETRPSDPRLRIIDIPCDDSTMALISPKTFLTDFIEHHKPHVRDIVQGIIESHSVRLAGFVLDMFCTAMTDVAREFGAPTYTYFTSGAATLGLMFYFQSKRDHEGYDATELKNTESELSVPSIVNPVPAKVLPDVLLDKEGGSKMFLDLAEMYRKSKGIIVNSFQELETHGVEYLLGDDNDIPPVFAVGPIVNLENKKDETKTDEIMRWLNEQPESSVVFLCFGSMGSFNEKQVKEIAVAIERSGHRFLWSLRRRPASKEKVEYPKEYENLEEVLPEGFLERTSSLGKVIGWAPQLAVLSHPSVGGFVSHCGWNSTLESICWCGVPMAAWPLYAEQQLNAFLLVVEHGLAVEIRMDYRTDPRAGVGEGMMVTAEEIEDGIRKLMSDDELRKKVKHMREKSRAAMIEGGSAYTSIGNFIHDLTI

SEQ ID NO: 70 - protein, 473 aa, Mikania micrantha; identical to SEQ ID NO: 69

SEQ ID NO: 71 - protein, 475 aa, Mikania micrantha
MLTSELIFIPSPGAGHLPPTLELAKLLLQRDQRLSATIIMMNISFGAKNSTETRPCNPRLRFIDIPCDDSTMALMTPKSFLFSFIQHHKPHVRDIVRGIIESNSVRLVGFVLDMFCTAMTDVANEFGAPTYTYFTSGATTLGLMLYLQARLDHEGYDIIGLKNSESKLCAPSFINPVPAKVLPKSLFDKEGGSKEFLRLMGRFRESKGIIVNSCLELETHGVEYLLRKDNDIPPVFAVGPIVNLENKKDDTKNDEIMRWLNEQPESSVVFLCFGSMGSFNEKQVKEIAVAIERSGHRFLWSLRRPASKEKVEYPKEYENVEEVLPEGFLERTSSFGKVIGWAPQIAVLSHPSVGGFVSHCGWNSTLESICWCGVPMAAWPLYAEQQLNAFLLVVELGMAVEIRMDYQTEARTGVSDGMMVTAKEIEDGIRKLMSDGELRKKVKDMKEKSRASIVEGGSAHTSIGNLINDLMNVTI

SEQ ID NO: 72 - protein, 475 aa, Mikania micrantha; identical to SEQ ID NO: 71

SEQ ID NO: 73 - protein, 475 aa, Mikania micrantha
MLTSELVFIPSPGAGHLPPTLELAKLLLQRDQRISATIIIMNVSFGAKQNTETRPSNPRLRIIDIPCDDSTMALIPPKTFLTDFIQHHKPHIRDIVRGIIESNSVRLAGFVLDMFCMAMTDVASEFGAPTYTYFTSGAATLGLMLYLQARLDHEGYDIIGLKNSESKVHAPSFVNPVPAKVLPKSLFDKEGGSRKFLKLMGRFRESKGIIVNSCLELETHAVEYLLSKDNDIPPVFAIGPIVNLENKKDDTKNEEIVRWLNEQPEGSVVFLCFGSMGSFNEKQVKEIAVAIERSGHRFLWSLRRPTPKETVEYPKEYENVEEVLPEGFLERTSSFGKVIGWAPQIAVLSHPSVGGFVSHCGWNSTLESICWCGVPMAAWPLYAEQQLNAFLLVVELGMAVEIRMDYQTEARTGVSDGMMVTAKEIEDGIRKLMSDGELRKKVKDMKEKSRAAIVEGGSAHTSIGNLIDNLMDVTI

SEQ ID NO: 74 - protein, 475 aa, Mikania micrantha; identical to SEQ ID NO: 73

SEQ ID NO: 75 - protein, 475 aa, Mikania micrantha
MLTSELIFIPSPGAGHLPPTLELAKLLLQRDQRLSATIIMMNISFGAKNSTETRPCNPRLRFIDIPCDDSTMALVTPKSFLFSFIQHHKPHVRDIVRGIIESNSVRLVGFVLDMFCTAMTDVANEFGAPTYTYFTSGATTLGLMLYLQARLDHEGYDIIGLKNSESKLCAPSFINPVPAKVLPKSLFDKEGGSKEFLRLMGRFRESKGIIVNSCLELETHGVEYLLRKDNDIPPVFAVGPIVNLENKKDDTKNDEIMRWLNEQPESSVVFLCFGSMGSFNEKQVKEIAVAIERSGHRFLWSLRRPTPKETMEYPKEYENVEEVLPEGFLERTSSFGKVIGWAPQIAVLSHPSVGGFVSHCGWNSTLESICWCGVPMAAWPLYAEQQLNAFLLVVELGMAVEIRMDYQTEARTGVSDGMMVTAKEIEDGIRKLMSDGELRKKVKDMKEKSRASIVEGGSAHTSIGNLINDLMNVTI

SEQ ID NO: 76 - protein, 475 aa, Mikania micrantha; identical to SEQ ID NO: 75

SEQ ID NO: 77 - protein, 474 aa, Artemisia annua
MTTLELVFIPSPGAGHLPPTVELAKLLLDHDQRLSVTIIIMNLPFEAEQVTETPISTPRLNFIYVANEDSSKDLISPHTFMSAFLEHQKPKLKNIIRDITESDSVRLVGFIVDMFCIAMIDVANEFGVPTYVYFTSSASALGLMFHLQAKCDDEEYDVTDLKDSDLMLSIPSYVKPIPAKLLPSVLFDKQGGSKMFIDLAKKFRESEGIIINSFQELESHGLEFLIKGDPNIPPVFPVGPILNLKNTKNDGKTTDIMAWLDNQPKSSVVFLCFGSMGSFGEKQVKEIAVALERSEHRFLWSLRRPPSKEVMRLPEEYENFKEVLPEGFLECTSNLGKVIGWAPQTSVLSHPSLGGFVSHCGWNSTLESIWFGVPVAAWPLYAEQQINAFQLVMELGIAAEIKIDYKSNIGPGGGSNEMLVKADEIESGIRRLMNDDDMRRNVKEMKHMSRLTVTEGGSSYASIKRFIELVITNT

SEQ ID NO: 78 - protein, 474 aa, Artemisia annua
MTTLELVFIPSPGAGHLPPTVELAKLLLDHDQRLSVTIIIMNLPFEAKQVTETLISTPRLNFIYVPNEDSSKDLISPHTFMSAFLEHQKPKLKNIIKDITESDSVRLVGFVVDMFCIAMIDVANEFGVPTYVYFTSSASALGLMFHLQAKCDGEEYDVTDLKDSDLMLSIPSYVKPIPAKLLPSVLSDKQGGSKMFIDLAKKFRESEGIIINSFQELESHGFEFLIKGDRNIPPVFPVGPILNLKNTKNDGKTTDIMAWLDSQPKSSVVFLCFGSMGSFGEKQVKEIAVALERSEHRFLWSLRRPPSKEVMRLPEEYENFKEVLPEGFLERTLNLGKVIGWAPQTSVLSHPSLGGFVSHCGWNSTLESIWFGVPVAAWPLYAEQQINAFQLVMELGIAAEIKIDYKSNIGPGGGSNEMLVKADEIESGIRRLMNDDDMRRNVKEMKHKSRLTVTEGGSSYASIKRFIELVITNT

SEQ ID NO: 79 - protein, 471 aa, Artemisia annua
MKTSELVFIPSPGVSHLTPTVELAKLLLARDDRLSVTIIIMKLLLGDKHDTGTPVSTDRLRYIEIPCDESTMALINPETFLTAFVEHNKTHVRNIVRENIIESDSVRLAAFVLDMFCMGMADVANEFGVPSYNYFTCGACMLGLMFDLQAKRDEEGHDVTELKDSGLELSIPSFVNPVPAKVLPEPVLDKKGGSKMFLDLANRFRETKGVIINTFQELESQGVEYLLSSSANIPPVFPVGPILNLSKAKNDSKTEEIMTWLNNQPESSVVFLCFGSMGSFSEKQVKEIAIALERSRHRFLWSLRRPQPEGSMEQPKEYENYEEVLPKGFIERTSSVGKVIGWAPQTAVLSHPSVGGFVSHCGWNSTLESIWCGVPIAAWPLYAEQQTNAFQLVVELGIAAEIRIDYRSDMGRGIYNMTVAAEEIEDGIRRLMNDHEMRNKMKEMKEKSRSAVLEGGSSYASIGNFIDHLNI

SEQ ID NO: 80 - protein, 471 aa, Artemisia annua
MKTSELVFIPSPGAGHLPPTVELAKLLLDRDDRLSVTIIIMKLFVGAKHDTGTPISTDRLRYIDIPCDESTMALVTPETFLSTFIEHNKIHVRNIVRENIIESNSVRLVGFVLDMFCMTMVDVANEFGVPTYNYFTSSASMLGLMFDLQAKRDEEGHDVTELKDSGLELSIPSYVNPVPAKVLPEVVLDKKGGSKIFLDLAKRFRETKGIIINTFQELESDGVEYLLSSNANIPPVFPVGPILNFSKAKNDSKTEEIMTWLNDQLESSVVFLCFGSMGSFSEKQVKEIAIALERSGHRFLWSLRRPQPKGKMEQPKEYENYEEVLPEGFIERTLSVGKVIGWAPQTTVLSHPSIGGFVSHCGWNSTLESIWCGVPIAAWPLYAEQQINAFQLVVELGIAAEIRIDYRSDMRRGINNMTVAAEEIEDGIRRLMNDHEMRNKVKEMKEKSRLAVLEGGSSYASVGHFIDHLNI

SEQ ID NO: 81 - protein, 474 aa, Stevia rebaudiana
MSTSELVFIPSPGAGHLPPTVELAKLLLHRDQRLSVTIIVMNLWLGPKHNTEARPCVPSLRFVDIPCDESTMALISPNTFISAFVEHHKPRVRDIVRGIIESDSVRLAGFVLDMFCMPMSDVANEFGVPSYNYFTSGAATLGLMFHLQWKRDHEGYDATELKNSDTELSVPSYVNPVPAKVLPEVVLDKEGGSKMFLDLAERIRESKGIIVNSCQAIERHALEYLSSNNNGIPPVFPVGPILNLENKKDDAKTDEIMRWLNEQPESSVVFLCFGSMGSFNEKQVKEIAVAIERSGHRFLWSLRRPTPKEKIEFPKEYENLEEVLPEGFLKRTSSIGKVIGWAPQMAVLSHPSVGGFVSHCGWNSTLESMWCGVPMAAWPLYAEQTLNAFLLVVELGLAAEIRMDYRTDTKAGYDGGMEVTVEEIEDGIRKLMSDGEIRNKVKDVKEKSRAAVVEGGSSYASIGKFIEHVSNVTI

SEQ ID NO: 82 - protein, 474 aa, Stevia rebaudiana; identical to SEQ ID NO: 81

SEQ ID NO: 83 - protein, 480 aa, Helianthus annuus
MQQMMTSELVFIPSPGAGHLPPTVELAKLLLHRDERLSVTIIIMNLPFGPKHNTQTPSCTPRLRFIDLPCGDSTMALITPKTFLSAFVEHHKSNVRDIVRGITESNSAQLAGFVVDMFCIAMTDVANEFGAPTYTYFTSGAATLGLMFYLQAKRDQEADDVTELKNSVTSELNAPGFINPVPANVLPEVVLDKEGGSKMFLDLAKRFRETSGIIVNTLQDLESQALKYLLCSSNEIPPVFAVGPILNLESKNLDNGKTDEIMRWLNKQPESSVVFLCFGSMGSFNEKQVKEIAVAIEQSGQRFLWSLRRPPPKEKFEYPKEYDNFEEVLPEGFLARTSSLGKVIGWAPQMAVLSHPSVGGFVSHCGWNSTLESIWCGVPVAAWPLYAEQQLNAFQLVVELGLAVEIRMDYRTDTRAGGGGSGMIVLAEEIEDGIRKLMSDDEMRKKVKDMKEKSRAAVLEGGSSHASVGKFIDLVVNVTI

SEQ ID NO: 84 - protein, 480 aa, Helianthus annuus; identical to SEQ ID NO: 83

SEQ ID NO: 85 - protein, 475 aa, Lactuca sativa
MTTSELVFIPSPGAGHLPPTVELARLLLDRDQRLSITIIIMNLPLEAKPDTETPTSTPRLRLIDIPSDDSTKDLISPNTFISKFLENQKPRVRDIVSGITESHSVRLVGFVVDMFCVAMTDVANEFGVPTYLYFTSSAAALGLMFDLQAKHDDEDFDVTELKDSELEVSLPSYANPVPAKVLPSVLFDKDGGCNTFIGLARKYRGMKGILVNTFEELERYAMESFLRSNANIPLVFPVGPILNLKTPTNDGKADGIMTWLDDQPDCSVVFLCFGSMGSFNEEQVKEIAVALEKSGQRFLWSLRRPPSKDKLMGLPKDYENYEDVLPEGFLERTSGVGKVIGWAPQTAVLSHSSVGGFVSHCGWNSTLESIWCGVPVAAWPLYAEQQLNAFKLVVELGLAAEIKIDYRSNMRPGGNEKEVIVSAAEIESGIRRLISDGEMRKKVKEMKEKSRFAVSEGGSSHASIGRFIDHVIVNE

SEQ ID NO: 86 - protein, 471 aa, Lactuca sativa
MTTSELVFIPSPGAGHLPPTVELAKILLDRDQRLSITIIVMKISLGAKHDTESATPIPRLRYIDIPCDESTMALISPKTFLSAFIEHHKPHVRNIIRSIIESNSVRLAGLVLDMFCAPMTEVANEFEAPTYIYYTSGASMLGLQLTLQAKRDEEEHDVTELKGSESELSIPTFVNSVPAKVLLDVLLDKEGGSKMFLDLAKTFRESKGILVNTFQELESHGVDYLLSSNADIPPVFPVGPILNLKNATNDGKTDEIMTWLNDQPESSVVFLCFGSMGSFSEKQVKEIAVAVERSGQRFLWSLRRPPPKGKIEYPKDYENPEEVLPEGFLDRTSSVGKVIGWAPQTAVLSHPSVGGFVSHCGWNSTLESIWCGVPVAAWPLYAEQQLNAFQLVVELGLAAEIRIDYRRNVGPEETEMIVTAEEIEGGIRKLMSDGEMRKKVKEMKEKSRLAIAEGGSSHAAIGRFIEHVISE

SEQ ID NO: 87 - protein, 471 aa, Lactuca sativa; identical to SEQ ID NO: 86

SEQ ID NO: 88 - protein, 480 aa, Sesamum indicum
MKKAELVFIPSPGMGHLVSTVELAKLLIDRGEQLSITVLIMKLPFDKKVSSYTSMLSESSDSRIRFLDLKPGESSSQSTFSSAFLYHFIDNHKSSVRDILAEMTNSASSDLAGVVIDMFCTSMIDVANEFGVPSYIFYTSGAAMLGLVLHMQSLRADFNEDVTNYKNSDVELAIPTYINPVPAKVLPSVIFDKDGGCDMFLNQAKRYKETKGIIINTFLELESHAVKALSNDKTIPPVYAVGPVLNLKGSNGPNQDTEMIMKWLDNQPVSSVVFLCFGSAGSFDGEQVKEIAHALQRSGVRFLWSLRRPPPKGKFQFPGDYEDPEEVLPEGFLRGTAEVGKVIGWAPQVAVLSHRAVGGFVSHCGWNSTLESVWCGVPMATWPLYAEQQTNAFLMVKDLGMAVEIKMDFRKDFLMEANEIVRAVVIENGIKQLMESESEFRNKVKEMKEKSRMALHGGGSSSDSLRRFLDDIMDNVPKLH

SEQ ID NO: 89 - protein, 476 aa, Camellia sinensis
MSKAQLVFIPSPGIGHLASTVEMAKLLVGRDDRLSITVLIMKFPFDNKGTTTQSLTSDRIRFLDLFHETSSTADPNSKTLFYDYIENHKTQVRDVVSEIVSKSESESTPRLAGFVIDMFCTSMIDVANEFGVPTYVFFTSSAGFLGLMFHIYTLQQDITELKDSDAELNVPAYANPVPAKVLPSVLFDKEVGFTMFLNITKRCRETEGIIVNTFTELEFHALKSLQDDHTIPNIYPVGPVLNLKGGSPNEAQNSQSEADIMRWLDDQDPSSVVFLCFGSMGSFDGDQVKEIARALESCGHRFLWSLRQPPPKGNIELPKEYENPTDVLPEGFLDRTAEIGKVIGWAPQVAVLSHRAVGGFVSHCGWNSTLESLWCGVPVATWPMYAEQQMNAFQLVREFGMAVEIKMDYKMDFGMKEMPVMVTAVEISSGIRRLMDGSDEIKHKVKKMSEKSTVAVTEGGSSYNSLGCFIEDVIKG

SEQ ID NO: 90 - protein, 479 aa, Camellia sinensis
MSKAQLVFIPSPGIGHLVSTVEMAKLLVGRDDRLSITVLVMKFPLDNKGTSYTQSLSSDRIRFLDLFHDTPSTADLNSKTPGSFLFDYIESHKPRVRDVVSEIVSKSESESTPRLAGFVIDMFCTPMIDVANEFGVPTYVFFTSSAAFLGLMFHIDTLQQDVTELEDSDAELTVPAYANPVPAKFLPSVLFDKEGGSMFLNIAKRCRETKGIIVNTFTELEFRALKSLQEDHTNPQMYPVGPVLNLKGGSPNEAQNSQSEADIMRWLDDQDPSSVVFLCFGSMGSFDGDQVKEIARALESCGHRFLWSLRQPPPKGEIGLPKEYENPTDVLPEGFLDRTAEIGKVIGWAPQVAVLSHRAVGGFVSHCGWNSTLESLWCGVPVATWPMYAEQQMNAFQLVMEFGMAAEIKMDYRKDYRMQKMPVMVTADEISSGIRQLMDGSDEIKHKVKKMSEKSRVAVMEGGSSYNSLGCFIEDVIQG

SEQ ID NO: 91 - protein, 473 aa, Morella rubra
MESTHTQASHIAILPTPGMGHLIPLVEFAKRLLHHHPNSFNITFIIPTDGPPSKAQKSVLDALPSSMNYFFLPEVNLDDVPKGAKIESLISLTVVRSLPSLREVLKSLVESSKLVAFVVDLFGTDAFDVARELNVSPYIFYPSTAMALSLFLYLPKLDEMVTCEYRDHPEPVKIPGCIPIHGKDLLDPVQDRKNDAYKWLLHHAKRYRLAEGILTNSFLELEPGAIEALQAEEPGKPPVYPVGPLVNMGSSGKVDGSECLKWLDEQPHGSVLFVSFGSGGTLSTNQMNELALGLEKSEQRFLWVVRTPNDHVANATYFSVQSEKDPFDFLPKGFLERTKGRGLVLPSWAPQAQVLSHSSTGGFLTHCGWNSILESVVNGVPLIAWPLYAEQKMNAVMLTEDIKVALRPKFNDNGLAGREEIAKVAKALMEGEEGKRLRSHMKNLKDAAARVLSEDGSSTKALSELALKWKNKK

SEQ ID NO: 92 - protein, 469 aa, Castanea mollissima
MEQKPHIALLPSPGMGHLIPLVEFAKLFVLHHDFRITCIIPVLGSPSKAMKAVLQALPTTIDHVFLPPVILEEEEIKGLKFEVQTILTLTRSLPPLRDVLKSTRFSAFVVDPFGIDALDIAKELKISPYIFFPTNAFVLSLMFHLPKLDETVSCEYRDLPEPLKLPGCIPIHGRDLIEPVQDRTSELYKMFLRNVKRFRLAEGIIVNTFMELEGSAIKALLDEEAKNLPLYPIGPIQSGSSNLQVDKSESDCLRWLDNQPRGSVLFVCFGSGGTLSYDQTNELALGLELSGQKFLWVVRTPDNESADAAYLSDQTLDNNPLAFLPKGFVERTEGQGLAVPSWAPQAQVLSHGSTGGFLTHCGWNSTLESIMQGIPLIAWPLYAEQKMNAPLLAEDLKVALRPKTNKNGLIDREEIAKVVKGLMVGEEGKKVHNRMKDIKIAAEKALSADGSSTKTLSELASQWKNHPGF

SEQ ID NO: 93 - protein, 469 aa, Castanea mollissima; identical to SEQ ID NO: 92

SEQ ID NO: 94 - protein, 466 aa, Castanea mollissima
MEQKPHIGILPSPGMGHLIPLVEFAKLLVHHHDFNITCIIPVLGSPSKAMKAVLHALPTTIDHVFLPPVILEEEEMKGPRFEVQTILTLTRSLPPLRDVLKSTRFSAFVVDPFGIDALDIAKELNISPYIFFPTNAFALSLIFHLPKLDETVSCEYRDLPEPLKLPGCIPIHGRDLAEPFQNRTSESYKMFLRIAKRFRLAEGIIVNTFMGLEGSAIKALLEEEAKNLPLYPVGPIQSGSSNQVEESDCLRWLGNQPHGSVLFVCFGSGGTLSYDQTNELALGLELSGQKFLWVVRTPNNESADAAYLSDQTLYNNPLAFLPKGFVERTEGQGLAVPSWAPQAQVLSHGSTGGFLTHCGWNSSLESIMQGIPLIAWPLYAEQKMNAVLLAEDLKVALRPKTNKNGLIDREEIAKVVKGLMDGEEGKKVRNRMKDIKIAAEKALNVDGSSTKTLSKLASKWKNHSSF

SEQ ID NO: 95 - protein, 466 aa, Castanea mollissima; identical to SEQ ID NO: 94

SEQ ID NO: 96 - protein, 469 aa, Quercus suber
MEQKPHIALLPSPGMGHLIPLVEFAKQFVLHHDFHITCIIPVLGSPSKAMKAVLQALPTTIDHVFLPPVILEEEEIKGLKFEVQTILTLTRSLPPLREVLKTTRFSAFVVDPFGIDALDIAKELNISPYIFFPSNAFALSLIFHLPKLDETVSCEYRDLPEPLKLPGCIPIHGRDLIEPVQDRTSELYKMFLRNAKRFRLAEGIIVNTFMELEGSAIKALLDEEAKNLPLYPIGPIQSGSSNLQVDKSVSDCLRWLDNQPHGSVLFVCFGSGGTLSYDQTNELALGLELSGQKFLWVVRTPNNESADAAYLSDQILDNNPLDFLPKGFVERTEGQGLAVPSWAPQAQVLSHGSTGGFLTHCGWNSTLESIMQGIPLIAWPLYAEQKMNAPLLAEDLKVALRPKTNKSGLIDQEEIAKVVKGLMIGEEGKKVYNRMKDIKMAAEKALSADGSSTKALSELASQWKNHPGF

SEQ ID NO: 97 - protein, 469 aa, Quercus suber; identical to SEQ ID NO: 96

SEQ ID NO: 98 - protein, 472 aa, Quercus suber
MLSKMEQKPHIALLPSLGMGHLIPLVEFAKQFVLHHDFHITCIIPVLGSPSKAMKAVLQALPTAIDHVFLPPVKLEEEEIKGLKFEVQTILTLTRSLPPLREVLKSTRFSAFVVDPFGIDALDIAKELNISPYIFFPTNAFALSLIFHLPKLDETVSCEYRDLPEPLKLPGCIPIHGRDLLEPVQDRTSELYKMFLRNAKRFRLAEGIIVNTFMELEGSAIKALLDEEAKNLPLYPIGPIQSGSSNQVDKSESDCLRWLDNQPHGSVLFVCFGSGGTLSYDQTNELALGLELSGQKFLWVVRTPNNESADAAYLSDQTLNNNLLAFLPKGFVERTEGQGLAVPSWAPQAQVLSHGSTGGFLTHCGWNSTLESIMQGIPLIAWPLYAEQKMNAPLLAEDLKVALRPKTNKNGLIDREEIAKVVKGLMIGEEGKKVYNRMKDIKMAAEKALSADGSSTKALSELASQWKNHPGF

SEQ ID NO: 99 - protein, 472 aa, Quercus suber; identical to SEQ ID NO: 98

SEQ ID NO: 100 - protein, 469 aa, Quercus suber
MEQKPHIAILPSPGMGHLIPFVEFAKLLLLHHDFHITCIIPTIGSPSKAMREVLQALPTSIDHVFLPPVSLEELGGVKPGIQITLTMIRSLPPLREVLTSLVATTRLVALVVDLFGTDALDVAKELNVSPYIFYPTNAMVVSLVLHLPKLDETVSCEYRDLPEPVKLPGCVPIHGRDLLDPIQDRTTELYKLFLRGAKWLRLVEGIIVNTFMELDGNVIKALEDEEAKSGTIYTIGPIIQSSSTKHVEGSDGLRWLDNQPRGSVLFVCFGSGGTLSYDQMKELALGLELSKQKFLWVVRSPNNELAQAAYFSDQTLDNNPLSFLPVGFIERTKEQGLVVPSWAPQAQVLSHDSTGGFLSHCGWNSTLESIMQGIPLIAWPLFAEQRMNALLLTEDLKVALRPKANEKNLVDREEIAKVIKSLMVGEDGKKIHSRMKDLKIAAEKALSPNGPSTKALADLASHWTNQSNS

SEQ ID NO: 101 - protein, 465 aa, Quercus suber
MEQKPHIAIFPSPGMGHLIPHLELAKLLALHHNFHITCIISVLGSPSRAMKEVLQALPTSIDHVFLPPVSSEDLEGLLPEVQTILTLTRSLPPLRDVLKSTRFAAFIVDTFGMDALDVAKEFNISPYIFFLSNAFALSLVLHLPKLDETISGEYRDQAEPLKLPGCVPIHGRDLAEPVQDRTSYWYKMFLRSTKRMRLAEGIMFNTFMELEENAIKALLDEEAKSLPLYPIGPIIQTGSSNQFKGSDCLRWLDSQPHGSVLFVCFGSGGTLSYEQTNELAFGLELSEQKFLWVVRTPNNESAGASYLSDQTLENNPLTSLPKGFVERTKGQGLVVPSWAPQVQVLSHSSTGGFLSHCGWNSTLESVMQGIPLIAWPLFAEQRMNAVLLAEDLKVALRPKANEKGLVHRDEIAKVVKGLMVGEEGKKVHSRMKDLKDAAEKALSVDGSSTKALTDLALHWTNQARF

SEQ ID NO: 102 - protein, 468 aa, Quercus suber
MEQKPHIALLPSPGMGHLVPLVELAKLLLLHHDFHITCIIPVLGSPSKAMKAVLQALPTSIDHVFLPPVILEEEEIKGLKLEVQAMLTLTRSLPPLRDVLKSTRFSAFVVDPFGIDALDIAKELNISPYIFFPSNAFALSLVLHLPKLDETVSCEYRDLPEPIKLPGCITIHGRDLLEPVQDRTSELYKMFLSNTKRYRLAEGIIVNTFMELEGSAIKALLEEEAKNLPLFPVGPIQSGSSNQVDKSESDCLRWLDNQPHGSVLFVCFGSGGTLSYDQTNELALGLELSGQKFIWVVRTPNNESADATYLSDQTLGNNPLAFLPKGFVERTKGQGLVVPFWAPQAQVLSHGSTGGFLTHCGWNSTLESIMQGIPLIVWPLFAEQKMNAALLAEDLKVALRPKTNKNGRIDREEITKVVKGLMVGEEGKKVRNRMKDIKIAAEKALSADGSSTKALSKLATQWKNHSDF

SEQ ID NO: 103 - protein, 468 aa, Quercus suber; identical to SEQ ID NO: 102

SEQ ID NO: 104 - protein, 468 aa, Quercus suber
MEQKPHIALLPSPGMGHLIPLVEFAKQFVLHHDFRITCIVPVLGSPSKAMKAVLQALPTTIDHVFLPPVKLEEEEIRGLKFEVQTILTLTRSLPPLREVLKSTRFSAFVVDPFGIDALDIAKELNISPYIFFPTNAFALSLIFHLPKLDKTVSCEYRDLPEPLKLPGCIPIHGRDLSEPVQDRTSELYKMFLRNAKRFRLAEGIIVNTFMELERSAIKALLDEEAKNLPLYPIGPIQSGSSNQVDKSESDCLRWLENQPHGSVLFVCFGSGGTLSYDQTNELALGLELSGQKFLWVVRTPNNESADAAYLSDQTLDNNPLAFLPKGFVERTEGQGLAVPSWAPQAQVLSHGSTGGFLTHCGWNSILESVMQGIPLIAWPLYAEQKMNAVLLAEDLKVALRPKTNKNGLIDREEIAKVVKGLMVGEEGKKVRNRMKDIKIAAVKALSADGSSTKALSELASQWKNHPGF

SEQ ID NO: 105 - protein, 468 aa, Quercus suber; identical to SEQ ID NO: 104

SEQ ID NO: 106 - protein, 470 aa, Quercus suber
MDQKPHIALLPSPGMGHLIPLVEFAKLLLHHHGFHITCIIPTTGSPSKAMKEVLQALPTSIEHVFLPPVNLEDLKGAKPGLQIALTMTRSVPSLRDVLTSLVATTRLVALVVDPFAIDALDVAKELNVSPYIFYPANAMVLSLLLNLPKLDETVSCEYRDLPEPVKLPGCIPIHGRDLIDPIQDRTSEWYKLILRWAKQMRLAEGIIVNTFMELDGNAITALEEEAKNLSLYTVGPIIQSGSSNQVEGSDCLRWLNNQPSGSVLFVCFGSGGTLSYDQMNELALGLELSKQKFLWVVRSPNNGLANAAYLADQTLDNNPLAFLPKGFIERTKEQGLVVPYWAPQAQVLSHGSTGGFLSHCGWNSTLESIMHGIPIIAWPLFAEQRMNAVLLTEDLKVALRPKANEKGLVDREEIAKVIKGLMVGEEGKKVHSRMKELKIAADKAVSPYGSSTKALADIASRWTNGPDFRT

SEQ ID NO: 107 - protein, 468 aa, Quercus lobata
MEQKPHIALLPSPGMGHLIPLVELAKLLLLHHDFHITCIIPVLGSPSKAMKAVLQALPTSIDNVFLPPVILEEEEIKGLKLEVQAMLTLTRSLPPLRDVLKSTRFSAFVVDPFGIDALDIAKELNISPYIFFSSNAFALSLVLHLPKLDETVPCEYRDLPEPVKLPGCIPIHGRDLIEPVQDRTSELYKMFLTNAKRYRLAEGIIVNTFMELEGSAIKAMLEEEAKNLPLFPVGPIQSGSSNQVDKLESDCLSWLDNQPHGSVLFVCFGSGGTLSYEQTNELALGLELSGQKFIWVVRTPNNESADATYLSDQNLGDNPLAFLPKGFVERTKGQGLVVPLWAPQAQVLSHGSTGGFLTHCGWNSTLESIMQGIPLIVWPLFAEQKMNAALLAEDLKVALRPKTDKNGLIDREEIAKVVKGLMVGEEGKKVHNRMEDIKIAAEKALSADGSSTKALSKLATQWKNHPDF

SEQ ID NO: 108 - protein, 468 aa, Quercus lobata; identical to SEQ ID NO: 107

SEQ ID NO: 109 - protein, 487 aa, Tanacetum cinerariifolium
MVAPTTDLHFVMFPLMAQGHMVPMVDIARMLAQQGATITIITTPLIANRFRPVISRAIEAKLQIQILELELRLAEVGLPEGCESFDTLPSSDYIEKLFAAIDLLEEPAEELLKGLCPQPGCIISDFLIPWTTDVARRFSIPRLVFNGPGCFWLLCMHVFSSSNILERIESDTERFVLPGLPDRVEVTKLQIIGTSKEASSYQKGFLFRAIQADKSAYGIVVHTFNELEPEYVKEFSKVRDTKVWCIGPVSLLNNDIGDISERGNKTAINNHDCLQWLNDREPGSVLYVCLGSLARISTQQVIELGLGLESTNQPFIWCVKNKTEELDKWFLGFKERVRDRGLIVHGWAPQLTILSHGAIGGFLTHCGWNSALESICAGIPMVTWPFLGDQFLNETFIVEILKIGVRIGVEIPVPFGEEDEIGVLLKKEDVKMAVECLMDKADEQGKQRRKRASELAEMAKRAMAEGGSSYVNVSSLIQDIETFKTQH

SEQ ID NO: 110 - protein, 487 aa, Tanacetum cinerariifolium; identical to SEQ ID NO: 109

SEQ ID NO: 111 - protein, 491 aa, Mikania micrantha
MAPSPPPTDLHFVLFPLMAQGHLVPMVDIARILAQRGATVTIITTPNDANRIRPVISRAIEAKLKILLLELQPRLAEAGLPEGCESFDQLPSFEYWKNLSAAIDLLEQPAEDLLRELSPPPDCIISDFLFPWTTDVARRFNIPRLVFNGPGCFFLLCMHVAISSNILGDTESVNERVVLPGLPDRIEVTKLQITGSSKAVTKEDMNSWVRAVDAEKAAYGIVVHTFNELEPEYVKEYTRVKETKVWCIGPVSLCNKNGLDIAERGNKAAINEHSCLNWLDEREPGSVLYVCLGSLARVSSKQAIELGLGLESINRPFIWCIRNKTEEFETWLSQGFVDRVRDRGLIIHGWAPQVLILSHQAIGGFLTHCGWNSTLESVSAGVPMVTWPFFADQFLNETFIVEILKIGVRIGVQIPVVYGEEDKVGVLVKKEDVKKAVECLMEEDEDGEERRKRVMELAKMAKIAMAEGGSSYQNVSSLIQDITKTIEKLDI

SEQ ID NO: 112 - protein, 491 aa, Mikania micrantha; identical to SEQ ID NO: 111

SEQ ID NO: 113 - protein, 494 aa, Artemisia annua
MVAPSTELHFVMFPLMAQGHIVPMVDIARILAEKGATVTIFATPLVANRFRPVISRAIEAKLKIQILELELQVAKVGLPEGCQSFEKLPSSDSSAKLFAAMDLLEQPAEDLVRKLSPPPDCIISDFLFPWTTDMARRFNIPRLVFHGPGCFWLVCMHAVFSSDKFKTIKLEEKFMLPGLPDQVEVTKLQITGTKEIKPEQMGFWVRATEAEKAAYGTVVHTFYELEPEYVKEYSKVKDTKVWCIGPVALSNKANLDIAERGNKAAINEHDCLKWLDEKEPGSVFYVCLGSITRLSTEQAIEIALGLESTNQPFLWFLRNKTQELEKWFSEVGFEERVKDRGLIVHGWAPQILILSHCAVGGFLTHCGWNSTLEGVSFGVPMVTWPHFADQFLNETFIVEILKIGVRIGVDIPELYGEEDKLEALVKKEDVKRAVECLMDKEDKEAKQRRKRARKLAEMAKRAMAEGGSSYVNVSSLIQDITEFRNTQQLNHLHV

SEQ ID NO: 114 - protein, 494 aa, Artemisia annua; identical to SEQ ID NO: 113

SEQ ID NO: 115 - protein, 494 aa, Artemisia annua
MVAPSTELHFVMFPLMAQGHIVPMVDIARILAEKGATVTIFATPLVANRFRPVISRAIEAKLKIQILELELQVAKVGLPEGCQSFEKLPSSDSSAKLFAAMDLLEQPAEDLVRKLSPPPDCIISDFLFPWTTDMARRFNIPRLVFHGPGCFWLVCMHAVFSSDKFKTIKLEEKFMLPGLPDQVEVTKLQITGTKEIKPEQMGFWVRATEAEKAAYGTVVHTFYELEPEYVKEYSKVKDTKVWCIGPVALSNKANLDIAERGNKAAINEHDCLKWLDEKEPGSVFYVCLGSITRLSTEQAIEIALGLESTNQPFLWFLRNKTQELEKWFSEVGFEERVKDRGLIVHGWAPQILILSHCAVGGFLTHCGWNSTLEGVSFGVPMVTWPHFADQFLNETFIVEILKIGVRIGVDIPELYGEEDKLEALVKKEDVKRAVECLMDKEDKEAKQRRKRARKLAEMAKRAMAEGGSSYVNVSSLIQDITEFRNTQRLNRLHV

SEQ ID NO: 116 - protein, 495 aa, Stevia rebaudiana
MSPKMVAPPTNLHFVLFPLMAQGHLVPMVDIARILAQRGATVTIITTPYHANRVRPVISRAIATNLKIQLLELQLRSTEAGLPEGCESFDQLPSFEYWKNISTAIDLLQQPAEDLLRELSPPPDCIISDFLFPWTTDVARRLNIPRLVFNGPGCFYLLCIHVAITSNILGENEPVSSNTERVVLPGLPDRIEVTKLQIVGSSRPANVDEMGSWLRAVEAEKASFGIVVNTFEELEPEYVEEYKTVKDKKMWCIGPVSLCNKTGPDLAERGNKAAITEHNCLKWLDERKLGSVLYVCLGSLARISAAQAIELGLGLESINRPFIWCVRNETDELKTWFLDGFEERVRDRGLIVHGWAPQVLILSHPTIGGFLTHCGWNSTIESITAGVPMITWPFFADQFLNEAFIVEVLKIGVRIGVERACLFGEEDKVGVLVKKEDVKKAVECLMDEDEDGDQRRKRVIELAKMAKIAMAEGGSSYENVSSLIRDVTETVRAPH

SEQ ID NO: 117 - protein, 495 aa, Stevia rebaudiana; identical to SEQ ID NO: 116

SEQ ID NO: 118 - protein, 491 aa, Lactuca sativa
MKMVAPVTDFHVVMFPLMAQGHMVPMVDIARILALRGAMVTIFTTPLVANRFRQVIERANESKLMIKLLELHLQLAEVGLPEGCESFDTLPSFESSNKLFAAINLLEQPAENLLRELSPPPSCIISDFCFPWTGDVAQRLNIPRLVFHGPGCFWLLSMHVVLTSKMLDTIESNSERFVLSGLPDRVEFTKPQLTGSFKARTADQMEFWSRAAAAEKTAYGIVVHTFEELEPEYVKELKKVKDTKIWCIGPVSLCNKDNSDIAERGNKATINEHDCLKWLDAREPGSVVYVCLGSLTRASTQQSIELGLGLESTNKPFIWCVRDKTEELEKWFSEEGFEERVSDRGLIVHGWAPQVLILSHRAVGGFLTHCGWNSTLEAVCAGVQMVTWPHFADQFINEAFIVEILKIGVRIGVDIPVPFGEEDKMEVLVKKEDVKRAVECLMDEGEEGKERRKRVSELAEMAKRAMEEGGSSYLNVSSLVQHLTDMQLKTR

SEQ ID NO: 119 - protein, 491 aa, Lactuca sativa; identical to SEQ ID NO: 118

SEQ ID NO: 120 - protein, 496 aa, Lactuca sativa
MASPSSDLHFILFPLMAQGHMIPMVDIARMLAQRDVHVTIITTPLNANRYKSVTDRAIKSNLKIQVLELKLPLAEVGLPEGCESFDLIPSTALVVKFFDAIAMLEEPTESMLRRLTPAPSCIISDSGLPWTTGLAKRLNIPRLVFYGPGCYTYLCIHIVANTRILDEIKSDSEYFVLPGLPDRIEVTKPQASDWPKRDSKDRLEMFERIEEAGKAAYGIVVNSFDELEPKYVEEFAKAKDKKVWCIGPVSLCNRSFLDVAERGSKASINEHDCLKWLDLREPGSVVYVCLGSLSYACTEQVIELGLGLELSNKPFIWFIRETNEELKRWLLEEAYEERIKDRGLMVFGWAPQILILSHAAVGGFITHCGWNSTLEGISAGIPMVTWPHFADQFLNERFITDVLKIGVRIGAEVPVSFGERDNLKVMVKREDVKIAVEGLMNDDDEGMARRKRAKELGEMAKRAMEEGGSSHNNMTSMIQAITEEVAKNNKPVQGIM

SEQ ID NO: 121 - protein, 370 aa, Artificial
  Artificial sequence
MSESPMFAANGMPKVNQGAEEDVRILGYDPLASPALLQVQIPATPTSLETAKRGRREAIDIITGKDDRVLVIVGPCSIHDLEAAQEYALRLKKLSDELKGDLSIIMRAYLEKPRTTVGWKGLINDPDVNNTFNINKGLQSARQLFVNLTNIGLPIGSEMLDTISPQYLADLVSFGAIGARTTESQLHRELASGLSFPVGFKNGTDGTLNVAVDACQAAAHSHHFMGVTLHGVAAITTTKGNEHCFVILRGGKKGTNYDAKSVAEAKAQLPAGSNGLMIDYSHGNSNKDFRNQPKVNDVVCEQIANGENAITGVMIESNINEGNQGIPAEGKAGLKYGVSITDACIGWETTEDVLRKLAAAVRQRREVNKK

SEQ ID NO: 122 - DNA, 1113 bp, Artificial
  Artificial sequence
atgagtgaatctccaatgttcgctgccaacggcatgccaaaggtaaatcaaggtgctgaagaagatgtcagaattttaggttacgacccattagcttctccagctctccttcaagtgcaaatcccagccacaccaacttctttggaaactgccaagagaggtagaagagaagctatagatattattaccggtaaagacgacagagttcttgtcattgtcggtccttgttccatccatgatctagaagccgctcaagaatacgctttgagattaaagaaattgtcagatgaattaaaaggtgatttatccatcattatgagagcatacttggagaagccaagaacaaccgtcggctggaaaggtctaattaatgaccctgatgttaacaacactttcaacatcaacaagggtttgcaatccgctagacaattgtttgtcaacttgacaaatatcggtttgccaattggttctgaaatgcttgataccatttctcctcaatacttggctgatttggtctccttcggtgccattggtgccagaaccaccgaatctcaactgcacagagaattggcctccggtttgtctttcccagttggtttcaagaacggtaccgatggtaccttaaatgttgctgtggatgcttgtcaagccgctgctcattctcaccatttcatgggtgttactttgcatggtgttgctgctatcaccactactaagggtaacgaacactgcttcgttattctaagaggtggtaaaaagggtaccaactacgacgctaagtccgttgcagaagctaaggctcaattgcctgccggttccaacggtctaatgattgactactctcacggtaactccaataaggatttcagaaaccaaccaaaggtcaatgacgttgtttgtgagcaaatcgctaacggtgaaaacgccattaccggtgtcatgattgaatcaaacatcaacgaaggtaaccaaggcatcccagccgaaggtaaagccggcttgaaatatggtgtttccatcactgatgcttgtataggttgggaaactactgaagacgtcttgaggaaattggctgctgctgtcagacaaagaagagaagttaacaagaaatag

SEQ ID NO: 123 - protein, 256 aa, Artificial
  Artificial sequence
MDFTKPETVLNLQNIRDELVRMEDSIIFKFIERSHFATCPSVYEANHPGLEIPNFKGSFLDWALSNLEIAHSRIRRFESPDETPFFPDKIQKSFLPSINYPQILAPYAPEVNYNDKIKKVYIEKIIPLISKRDGDDKNNFSSVATRDIECLQSLSRRIHFGKFVAEAKFQSDIPLYTKLIKSKDVEGIMKNITNSAVEEKILERLTKKAEVYGVDPTNESGERRITPEYLVKIYKEIVIPITKEVEVEYLLRRLEE

SEQ ID NO: 124 - DNA, 771 bp, Artificial
  Artificial sequence
atggacttcactaagccagaaaccgttttgaacttgcagaacatcagagatgaattggtcaggatggaagattccatcatcttcaagttcatcgagagatctcatttcgctacttgtccatctgtttacgaagctaatcatccaggtttggaaatcccaaatttcaagggttcttttttggattgggccttgtccaatttggaaattgctcactctagaatcagaaggtttgaatctccagacgaaactccatttttcccagataagatccagaagtctttcctgccatctattaactacccacaaattttggctccatacgcacctgaagttaactacaacgataagattaagaaggtctacatcgagaagatcatcccattgatttctaagcgtgatggtgatgacaagaacaacttttcatctgttgccaccagagatatcgaatgcttgcaatctttgtccagaagaatccatttcggtaagtttgttgctgaagccaagttccaatctgatatcccattatacaccaagctgatcaagtccaaagatgtcgaaggtatcatgaagaacattaccaactctgccgttgaagaaaagatcttggaaagattgaccaaaaaggccgaagtttatggtgttgatccaactaatgaatccggtgaaagaagaattaccccagaatacttggtcaagatctacaaagaaatcgtcatcccaatcaccaaagaagtggaagttgaatacttgttgagaaggttggaagaataa

SEQ ID NO: 125 - protein, 452 aa, S. cerevisiae
MVSEDKIEQWKATKVIGIIGLGDMGLLYANKFTDAGWGVICCDREEYYDELKEKYASAKFELVKNGHLVSRQSDYIIYSVEASNISKIVATYGPSSKVGTIVGGQTSCKLPEIEAFEKYLPKDCDIITVHSLHGPKVNTEGQPLVIINHRSQYPESFEFVNSVMACLKSKQVYLTYEEHDKITADTQAVTHAAFLSMGSAWAKIKIYPWTLGVNKWYGGLENVKVNISLRIYSNKWHVYAGLAITNPSAHQQILQYATSATELFSLMIDNKEQELTDRLLKAKQFVFGKHTGLLLLDDTILEKYSLSKSSIGNSNNCKPVPNSHLSLLAIVDSWFQLGIDPYDHMICSTPLFRIFLGVSEYLFLKPGLLEQTIDAAIHDKSFIKDDLEFVISAREWSSVVSFANFDIYKKQFQSVQKFFEPMLPEANLIGNEMIKTILSHSSDRSAAEKRNT

SEQ ID NO: 126 - DNA, 1359 bp, S. cerevisiae
atggtatcagaggataagattgagcaatggaaagccacaaaagtcattggtataattggtctgggtgatatgggcctattatacgctaataaatttacagatgctggatggggtgttatatgttgtgatagggaagaatattatgatgaactgaaagaaaaatatgcctcagctaaattcgaactggtgaaaaatggtcatttggtatccaggcaaagcgactatattatctatagtgttgaagcatccaatattagtaagatcgtcgcaacgtatggaccatcttctaaggttggaacaattgttgggggtcaaacgagttgtaagctgccggaaatcgaggctttcgaaaagtatttacccaaggactgcgacatcattaccgtgcattcccttcatgggcctaaagttaatactgaaggccaaccactagttattatcaatcacagatcacagtacccagaatcttttgagttcgttaattctgttatggcatgtttgaaaagtaagcaagtttatttgacatatgaagagcatgacaagattaccgctgatacacaagctgtgacacatgctgctttcttaagtatgggatctgcgtgggcaaagataaagatttatccttggactctgggtgtaaacaaatggtacggtggcctagaaaatgtgaaagttaatatatcactaagaatctattcgaacaagtggcatgtttacgcaggattagccataacaaacccaagtgcacatcagcaaattcttcaatatgcaaccagtgcaacagaactatttagtttaatgatagataacaaagaacaagaacttactgatagactattaaaagctaagcaatttgtatttggaaagcatactggtctcttactattggatgacacgattttagagaaatattcgctatcaaaaagcagcattggtaacagcaacaattgcaagccagtgccgaattcacatttatcattgttggcgattgttgattcgtggtttcaacttggtattgatccatatgatcatatgatttgttcgacgccattattcagaatattcctgggtgtgtccgaatatctttttttaaaacctggcttattagaacagacaattgatgcagctatccatgataaatcattcataaaagatgatttagaatttgttatttcggctagagaatggagctcggttgtttcttttgccaattttgatatatacaaaaagcaatttcagagtgttcaaaagttctttgagccaatgcttccagaggctaatctcattggcaacgagatgataaaaaccattctgagtcattctagtgaccgttcggccgctgaaaaaagaaatacataa

SEQ ID NO: 127 - protein, 499 aa, Spinacia oleracea
MENTTLALILPILFICFHLIHSFICQSRKSSKLPPGPKRMPIFGNIFDLGEKPHRSFANLAKIHGPLVSLKLGSITTIVVSSAEVAKEMFLKNDQLLSNRTIPDSVRAGDHDKLSMSWLPVSAKWRNLRKISAVQLLSNQRLDASQAQRQAKVKQLLAYVQDCSKKGQPVDIGRAAFTTSLNLLSNTFFSVELASHESSVSQEFKQLMWNMMEEIGRPNYADYFPILGYVDPFGIRRRLAAYFDQLIVVFQDIIRERQKVRSTNGSNAKQTNDILDTLLNLHGENELSMGEINHLLADIFNAGTDTTASTLEWAMTELVKNPNMMGRVQNEIEQALGRDCSSIQESDILKLPYLQAIIKETLRLHPPTVFLLPRKADTDVELNGYLVPKNAQVLVNLWAIGRDPKVWENPEVFLPERFLNSEIDVKGRDFELLPFGAGRRICPGLTLAYRMLNLMLATLVNNYDWKLEDGMNPENLDMDEKFGITLQKVNPLRAIPIPR

SEQ ID NO: 128 - DNA, 1500 bp, Spinacia oleracea
atggaaaacaccaccttggccttgattttgccaattttgttcatctgcttccacctgatccattccttcatttgccaatccagaaagtcctctaaattgccaccaggtccaaaaagaatgccaatctttggtaacatcttcgacttgggtgaaaagccacatagatcttttgctaacttggctaagattcacggtccattggtttctttgaagttgggttctatcactaccatcgttgtttcatcagctgaagttgccaaagaaatgttcttgaagaacgaccagttgttgtccaacagaactattccagattctgttagagctggtgatcacgataagttgtctatgtcttggttgccagtttctgctaaatggcgtaacttgagaaagatttctgctgtgcagctgttgtctaatcaaagattagatgcttcccaagctcaaagacaagctaaagtcaaacagttgttggcttacgttcaagactgttctaaaaagggtcaaccagttgatattggtagagctgcttttactacctccttgaacttgttgtcaaacaccttcttctctgttgaattggcctctcatgaatcctctgtttctcaagaattcaagcagttgatgtggaacatgatggaagaaattggtagaccaaactacgctgattacttcccaattttgggttacgttgatcctttcggtatcagaagaagattggctgcttactttgaccaattgatcgttgtgttccaagacatcatcagagaaagacaaaaagtcaggtctacgaatggttctaacgctaagcaaactaacgatatcttggacaccttgttgaacttgcatggtgaaaacgaattgtccatgggtgaaatcaatcatttgttggccgatattttcaacgctggtactgatacaactgcttctactttggaatgggctatgactgaattggttaagaacccaaatatgatgggtagagtccagaacgaaattgaacaagctttgggtagagattgctcctccattcaagaatctgacatcttgaaattgccatacttgcaggccattatcaaagagactttgagattgcatccaccaaccgtttttttgttgccaagaaaagctgatactgacgtcgaattgaacggttatttggttccaaagaacgcccaagttttggttaatttgtgggctataggtagagatccaaaggtttgggaaaatccagaagttttcttgccagaacgtttcttgaactccgaaattgatgttaagggcagagattttgagttgttgccatttggtgctggtagaagaatttgtccaggtttgacattggcttacaggatgttgaatttgatgttggctaccttggttaacaactacgattggaaattggaggatggtatgaacccagaaaatttggatatggacgaaaagttcggtattaccttgcaaaaggttaacccattgagagccattccaattccaagatga

SEQ ID NO: 129 - protein, 537 aa, Beta vulgaris
DNAARFYKWFLEGKDRGEWLQNLEYGVFGLGNRQYEHFNKVGKEIDELLAEQGAKRLVPVGLGDDDQCIEDDFTAWKDLVWPELDRLLRDEDDVAVSTPYTATIPEYRVVFHEAAEVAQQDKSWANANGHAVFDAQHPCRSNVAVRRELHTPASDRSCTHLEFDVSGTGLKYETGDHVGVYCENLVETVEEAERLLGLKDTYFSIHTDNEDGTPVAGTSLPPPFPPCTLRSALTRYADLLSSPKKSALLALAAHASDPNEAKRLKYLASPAGKDEYSQWVVASQRSLLEVMAEFPSAKPPLGVFFAAVAPRLQPRYYSISSSPRVAPSRIHVTCALVLDKMPTGRIHKGVCSTWMKNSVAQGESHDCSWAPIFVRQSNFKLPADSSVPIIMIGPGTGLAPFRGFLQERSALKEDGVDLGQAILFFGCRNRKVDFIYEDELQNFVETGVLSELVVAFSREGPTKEYVQHKMMERASDVWNVINQGGYVYVCGDAKGMARDVHRVLHTILQEQGGMGSSQAEGMVKNLQTTGRYLRDVW

SEQ ID NO: 130 - DNA, 2118 bp, Beta vulgaris
atggactccaactccatcaaggtttctccattggatttgatgtctgctttgttgaagggtaacttcgaacaattgaacgcctctttcgaagattcttctgctgctgctttgatcgttgaaaacagagaagttttgatgttcgtcaccacctctattgctgttttgattggttgtgccttcttgttcatctggaaaaagtctaacggtggcaagtcctctaaagttgtttctgaattgccaaagccactgatcttgaaggatgatgatgttgaagttgatgacggtaagaagaaggttactgttttcttcggtactcaaactggtactgctgaaggttttgctaaagctttggttgaagaggctaaagccagatacgaaaaggctacttttaagatcgttgacttggatgattacgccggtgatgatgacgaatacgaaagaaagttgaagaaagagaacctggctttcttcttcttggctacttatggtgatggtgaacctactgataatgctgctagattttacaagtggttcttggaaggtaaggatagaggtgaatggttgcaaaatttggagtacggtgtttttggtttgggtaacagacaatacgaacacttcaacaaggtcggtaaagaaatcgatgaactgttggctgaacaaggtgctaaaagattggttccagttggtttaggtgatgacgatcaatgtatcgaagatgattttaccgcttggaaagatttggtatggccagaattggacagactgttgagagatgaagatgatgtagctgtttctactccatacactgctactattccagagtacagagttgtttttcatgaagctgctgaagttgcccaacaagataagtcttgggctaatgctaatggtcatgctgtttttgatgctcaacatccatgtagatctaacgttgctgttagaagagaattgcatactccagcttcagatagatcttgtacccatttggaattcgatgtttctggtactggtttgaagtacgaaactggtgatcatgttggtgtttactgcgaaaacttggttgaaactgttgaagaagctgaaaggttgttgggtttgaaggatacctacttctctatccataccgataacgaagatggtactccagttgctggtacttctttgccaccaccatttccaccatgtactttgagatctgctttgactagatacgccgatttgttgtcctctccaaaaaaatctgctttattggccttggctgctcatgcttctgatccaaatgaagctaagagattgaagtacttggcttctccagctggtaaagatgaatattctcaatgggttgttgcctctcagagatctttgttggaagttatggctgaatttccatctgctaaaccaccattgggtgttttttttgctgctgttgctccaagattgcagccaagatattactccatttcatcttctccaagagttgccccatctagaattcatgttacttgtgctttggtgttggataagatgccaactggtagaattcacaagggtgtttgttcaacctggatgaagaattctgttgctcaaggtgaatctcatgattgctcttgggctccaattttcgttagacaatctaactttaagttgcccgctgattcttccgttccaattatcatgattggtccaggtacaggtttggctccttttagaggttttctacaagaaaggtccgccttgaaagaagatggcgttgatttgggtcaagccattttgttttttggctgcagaaacagaaaggtcgacttcatatacgaagatgagttgcaaaacttcgtcgaaacaggtgttttgtccgaattggttgttgctttttctagagaaggtcccaccaaagaatacgttcaacataagatgatggaaagagcttctgacgtttggaacgttatcaatcaaggtggttacgtttacgtttgcggtgatgctaaaggtatggcaagagatgttcatagagtcttgcataccatcctacaagagcaaggtggtatgggttcttctcaagctgaaggtatggttaagaacttgcaaactactggtagatacttgagggatgtttggtaa

SEQ ID NO: 131 - protein, 100 aa, Pseudomonas putida
DNAQWLAGQVEAAAEWEVLAPVQLQTLCIRHRPAGLEGEALDAHTKGWAERLNASGAAYVTPATLDGRWMVRVSIGALPTERGDVQRLWARLQDVIKGGS

SEQ ID NO: 132 - DNA, 1419 bp, Pseudomonas putida
atgaccccagaacaattcagacaatacggtcaccaattgattgatttgatcgccgattacagacaaaccgttggtgaaagaccagttatggctcaagttgaaccaggttatttgaaagctgctttgccagctactgctccacaacaaggtgaaccatttgctgctattttggatgatgttaacaacttggttatgccaggtttgtctcattggcaacatccagatttttacggttactttccatccaacggtactttgtcatctgttttgggtgatttcttgtctactggtttgggtgttttaggtttgtcatggcaatcttctccagctttgtcagaattggaagaaactactttggattggttgagacagttgttgggtttatctggtcaatggtctggtgttattcaagatactgcttctacttctaccttggttgctttgatttctgctagagaaagagctactgattacgctttggttagaggtggtttacaagctgaacctaaaccattgatcgtttacgtttctgctcatgcccattcttcagttgataaggctgctttgttggctggttttggtagagataacattagattgattccaaccgacgaaagatacgccttaagaccagaagctttacaagcagctattgaacaagatttggctgctggtaatcaaccatgtgctgttgttgctactactggtactactactacaactgctttggatccattaagacctgtaggtgaaattgctcaagctaatggtttgtggttgcatgttgattcagctatggctggttctgctatgattttgccagaatgtagatggatgtgggatggtattgaattggctgattctgttgttgttaacgcccataagtggttgggtgttgcttttgattgctctatctactacgttagagatccacaacacttgatcagagtcatgtctactaatccatcctacttgcaatctgctgttgatggtgaagttaagaacttgagagattggggtattccattgggtagaagattcagagctttgaagttgtggtttatgttgagatccgaaggtgttgatgcattgcaagctagattgagaagagatttggataatgctcaatggttggctggacaagttgaagctgctgctgaatgggaagttttggctccagttcaattgcaaaccttgtgcattagacatagaccagcaggtttggaaggtgaagctttggatgctcatacaaaaggttgggctgaaagattgaatgcttctggtgctgcttatgttactccagctactttagatggaagatggatggttagagtttccattggtgctttaccaactgaaagaggtgacgttcaaagattgtgggctagattacaagatgtcatcaaaggtggttcctaa

SEQ ID NO: 133 - protein, 178 aa, Coptis japonica
MERLIFNGRPLLHRVTKEETVMLYHELEVAASADEVWSVEGSPELGLHLPDLLPAGIFAKFEITGDGGEGSILDMTFPPGQFPHHYREKFVFFDHKNRYKLVEQIDGDFFDLGVTYYMDTIRVVATGPDSCVIKSTTEYHVKPEFAKIVKPLIDTVPLAIMSEAIAKVVLENKHKSSE

SEQ ID NO: 134 - DNA, 537 bp, Coptis japonica
atggaaagattgatcttcaatggtagacctttgttgcacagagttaccaaagaagaaaccgttatgttgtaccacgaattggaagttgctgcttctgctgatgaagtttggtctgttgaaggttctccagaattgggtttacatttgccagatttgttgccagctggtatttttgccaagttcgaaattactggtgatggtggtgaaggttccattttggatatgacttttccaccaggtcaattcccacatcattacagagaaaagttcgtctttttcgaccacaagaacagatacaagttggtcgaacaaatcgatggtgatttcttcgatttgggtgttacttactacatggacaccattagagttgttgctactggtccagattcttgcgttattaagtctactactgaataccacgtcaagccagaatttgctaaaatcgttaagccattgatcgataccgttccattggctattatgtctgaagctattgccaaggttgtcttggaaaacaaacacaagtcatctgaatga

SEQ ID NO: 135 - protein, 346 aa, Papaver somniferum
METVSKIDQQNQAKIWKQIYGFAESLVLKCAVQLEIAETLHNNVKPMSLSELASKLPVAQPVNEDRLFRIMRYLVHMELFKIDATTQKYSLAPPAKYLLRGWEKSMVDSILCINDKDFLAPWHHLGDGLTGNCDAFEKALGKSIWVYMSVNPEKNQLFNAAMACDTRLVTSALANECKSIFSDGISTLVDVGGGTGTAVKAISKAFPDIKCTIYDLPHVIADSPEIPNITKISGDMFKSIPSADAIFMKCILHDWNDDECIQILKRCKEALPKGGKVIIVDVVIDMDSTHPYAKIRLTLDLDMMLNTGGKERTKEEWKTLFDAAGFASHKVTQISAVQSVIEAYPY

SEQ ID NO: 136 - DNA, 1041 bp, Papaver somniferum
atggaaaccgtgtccaagatcgatcaacaaaatcaagctaagatctggaagcagatctacggttttgctgaatctttggttttgaagtgcgctgtgcaattggaaattgctgaaaccttgcataacaacgtcaagccaatgtctttgtctgaattggcttctaaattgccagttgctcaaccagttaatgaggataggttgttcagaatcatgagatacttagtccacatggaactgttcaagattgatgctactacccagaaatattctttggctccaccagctaaatacttgttgagaggttgggaaaagtccatggttgattctattttgtgcatcaacgacaaggattttttggctccttggcatcacttaggtgatggtttgactggtaattgtgatgcttttgaaaaggctttgggcaagtctatttgggtttacatgtctgttaacccagagaagaatcagttgtttaatgctgctatggcttgcgatacaagattggttacttctgctttggctaacgaatgcaagtccattttctctgatggtatctctaccttggttgatgttggtggtggtactggtactgctgttaaggctatttctaaggctttcccagatattaagtgcaccatctatgatttgccacatgttattgctgattccccagaaattccaaacatcaccaaaatctctggtgacatgtttaagtccattccatctgctgatgccattttcatgaagtgcattctgcatgattggaacgatgatgaatgcatccaaatcttgaagagatgcaaagaagccttgccaaaaggcggtaaagttatcattgtcgatgttgtcatcgacatggattctactcatccatacgctaagattagattgaccttggatttggacatgatgttgaacactggtggtaaagaaaggaccaaagaagaatggaaaaccttgtttgatgcagctggttttgcttctcataaggttactcaaatttccgccgttcaatctgttattgaagcctatccttactaa

SEQ ID NO: 137 - protein, 358 aa, Coptis japonica
MAVEAKQTKKAAIVELLKQLELGLVPYDDIKQLIRRELARRLQWGYKPTYEEQIAEIQNLTHSLRQMKIATEVETLDSQLYEIPIEFLKIMNGSNLKGSCCYFKEDSTTLDEAEIAMLDLYCERAQIQDGQSVLDLGCGQGALTLHVAQKYKNCRVTAVTNSVSQKEYIEEESRRRNLLNVEVKLADITTHEMAETYDRILVIELFEHMKNYELLLRKISEWISKDGLLFLEHICHKTFAYHYEPLDDDDWFTEYVFPAGTMIIPSASFFLYFQDDVSVVNHWTLSGKHFSRTNEEWLKRLDANLDVIKPMFETLMGNEEEAVKLINYWRGFCLSGMEMFGYNNGEEWMASHVLFKKK

SEQ ID NO: 138 - DNA, 1077 bp, Coptis japonica
atggctgttgaagctaagcaaactaagaaggctgctatcgttgagttgttgaagcaattggaattgggtttagttccatacgacgacatcaagcaattgatcagaagagaattggctagaagattgcaatggggttataagccaacttacgaagaacaaattgccgagattcaaaacttgacccactctttgagacaaatgaagattgctactgaagtcgaaaccttggattctcagttgtacgaaattccaatcgagttcctgaagatcatgaacggttctaatttgaagggttcttgctgctacttcaaagaagattctaccactttggatgaagccgaaattgctatgttggacttgtattgtgaaagggcccaaattcaagatggtcaatctgttttggacttaggttgtggtcaaggtgctttgactttacatgttgctcaaaagtacaagaactgcagagttactgctgttaccaactccgtttctcaaaaagagtacatcgaagaagaatccagaaggcgtaatttgttgaacgttgaagttaagttggccgatattactactcacgaaatggctgaaacctacgatagaattttggtcatcgagttgttcgagcacatgaagaattacgagttgctgttgagaaagatctccgaatggatttctaaggacggtttgttgttcttggaacatatttgccataagaccttcgcctatcattacgaaccattggatgatgatgattggttcaccgaatatgtttttccagccggtactatgattattccatccgcttcattctttctgtacttccaagatgatgtttccgttgttaatcactggaccttgtctggtaaacacttctctagaactaacgaagaatggttgaagagattggatgccaacttggatgttatcaagccaatgttcgaaactttgatgggtaatgaagaagaagccgtcaagctgattaactattggagaggtttttgcttgtccggcatggaaatgtttggttacaacaatggtgaagaatggatggcctctcatgttttgttcaagaagaagtaa

SEQ ID NO: 139 - protein, 488 aa, Eschscholzia californica
MEVVTVALIAVIISSILYLLFGGSGHKNLPPGPKPWPIVGNLLQLGEKPHAQFAELAQTYGDIFTLKMGTETVVVASTSSAASEILKTHDRILSARYVFQSFRVKGHVENSIVWSDCTETWKNLRKVCRTELFTQKMIESQAHVREKKCEEMVEYLKKKQGEEVKIVEVIFGTLVNIFGNLIFSQNIFELGDPNSGSSEFKEYLWRMLELGNSTNPADYFPMLGKFDLFGQRKEVAECLKGIYAIWGAMLQERKLAKKVDGYQSKNDFVDVCLDSGLNDYQINALLMELFGAGTETSASTIEWAMTELTKNPKITAKIRSEIQTVVGERSVKESDFPNLPYLEATVKETLRLHPPTPLLLPRRALETCTILNYTIPKDCQIMVNAWGIGRDPKTWTDPLTFSPERFLDSSVDFRGNDFSLIPFGAGRRICPGLPIANQFIALLVATFVQNLDWCLPNGMSVDHLIVEEKFGLTLQKEPPLFIVPKSRV

SEQ ID NO: 140 - DNA, 1467 bp, Eschscholzia californica
atggaagttgttaccgttgctttgatcgccgttattatctcttctatcctgtacttgttgttcggtggttctggtcataagaatttgccaccaggtccaaaaccatggccaatagttggtaatttgttgcagttgggtgaaaagccacatgctcaatttgctgaattggctcaaacttacggtgatatcttcactttgaagatgggtactgaaaccgttgttgttgcttctacttcttctgctgcttccgaaattttgaaaacccacgatagaattttgtccgccagatacgttttccagtcttttagagttaagggtcacgtcgaaaattccatagtttggtctgattgcactgaaacctggaagaatttgagaaaggtatgtagaactgagctgttcacccaaaagatgattgaatctcaagctcacgtcagggaaaaaaagtgtgaagaaatggtcgagtacctgaagaaaaagcaaggtgaagaagttaagatcgtcgaagttatcttcggtactttggttaacattttcggcaacttgatcttctcccagaacatctttgaattgggtgatccaaattctggctcctctgagtttaaagaatatctgtggcgtatgttggaattgggcaattctactaatccagctgattactttccaatgttgggcaagtttgatttgttcggtcaaagaaaagaagtcgccgaatgtttgaaaggtatctatgctatttggggtgccatgttgcaagaaagaaaattggctaaaaaggtcgacggttaccaatccaagaatgatttcgttgatgtctgcttggattccggtttgaatgattaccaaatcaacgctctgctgatggaattatttggtgctggtacagaaacttccgcttctactattgaatgggctatgactgaattgacgaagaacccaaagattaccgccaagattagatccgaaatccaaactgttgttggtgagagatctgtcaaagaatctgatttcccaaatctgccatacttggaagctactgtgaaagaaactttgagattgcatccaccaacaccattgctattgccaagaagggctttagaaacttgcaccattttgaactacaccattccaaaggattgccagattatggttaatgcttggggtattggtagagatccaaaaacttggactgatccattgacattctctccagagagattcttagattcctccgttgattttagaggcaacgacttttccttgattccattcggtgcaggtagaagaatatgtccaggtttgccaattgctaaccagttcattgctttgttggttgctactttcgttcaaaacttagattggtgtttgccaaacggtatgtccgttgatcatttgatcgttgaagaaaagttcggtctgaccttgcaaaaagaaccacctttgtttatcgtcccaaagtccagagtttga

SEQ ID NO: 141 - protein, 350 aa, Coptis japonica
MAFHGKDDVLDIKAQAHVWKIIYGFADSLVLRCAVELGIVDIIDNNNQPMALADLASKLPVSDVNCDNLYRILRYLVKMEILRVEKSDDGQKKYALEPIATLLSRNAKRSMVPMILGMTQKDFMTPWHSMKDGLSDNGTAFEKAMGMTIWEYLEGHPDQSQLFNEGMAGETRLLTSSLISGSRDMFQGIDSLVDVGGGNGTTVKAISDAFPHIKCTLFDLPHVIANSYDLPNIERIGGDMFKSVPSAQAIILKLILHDWNDEDSIKILKQCRNAVPKDGGKVIIVDVALDEESDHELSSTRLILDIDMLVNTGGKERTKEVWEKIVKSAGFSGCKIRHIAAIQSVIEVFP

SEQ ID NO: 142 - DNA, 1053 bp, Coptis japonica
atggccttccacggtaaggatgatgttttggatattaaggctcaagcccatgtttggaagattatctatggtttcgctgacagcttggttttgagatgtgctgttgaattgggtatcgttgatatcatcgacaacaacaatcaacctatggctttggctgatttggcttctaaattgccagtttctgatgttaactgcgacaacttgtacagaatcttgagatacttggtcaagatggaaatcttgagggttgaaaagtctgatgacggtcaaaaaaagtacgccttggaacctattgctaccttgttgtctagaaacgctaagagatcaatggtcccaatgattttgggtatgacacaaaaggattttatgaccccatggcactctatgaaggatggtttgtctgataatggtactgctttcgaaaaagctatgggcatgactatttgggaatacttggaaggtcatccagatcaatctcagttgtttaatgaaggtatggctggtgaaactaggttgttgacttcttctttgatctccggttctagagatatgttccaaggtatcgattctttggttgatgttggtggtggtaatggtacaactgttaaggctatttctgatgctttcccacatattaagtgcaccttgtttgatttgccacatgttattgccaactcctacgatttgccaaacattgaaagaatcggtggtgacatgtttaagtctgttccatctgctcaagccatcatcttgaaattgatattgcacgattggaacgacgaggacagcattaagattttgaagcaatgcagaaacgccgttccaaaagatggtggtaaagttatcattgtcgatgttgccttggatgaagaatccgatcatgaattgtcatccaccagattgattttggacatcgatatgttggttaacaccggtggcaaagaaagaacaaaagaagtttgggaaaagatcgttaagtccgctggtttttctggttgcaagattagacatattgccgccattcaatccgtcattgaagtgttcccttaa

SEQ ID NO: 143 - protein, 887 aa, Papaver bracteatum
MELQYFSYFQPTSSVVALLLALVSILFSVVVLRKTFSNNYSSPASSTETAVLCHQRQQSCALPISGLLHVFMNKNGLIHVTLGNMADKYGPIFSFPTGSHRTLVVSSWEMVKECFTGNNDTFFSNRPIPLAFKIIFYAGGVDSYGLALVPYGKYWRELRKICVHNLLSNQQLLKFRHLIISQVDTSFNKLYELCKNSEDNQGMVRMDDWLAQLSFSVIGRIVCGFQSDPKTGAPSRVEQFKEAINEASYFMSTSPVSDNVPMLGWIDQLTGLTRNMTHCGKKLDLVVESIINDHRQKRRFSRTKGGDEKDDEQDDFIDICLSIMEQPQLPGNNNPPKIPIKSIVLDMIGGGTDTTKLTTIWTLSLLLNNPHVLDKAKQEVDAHFLTKRRSTNDAAVVDFDDIRNLVYIQAIIKESMRLYPASPVVERLSGEDCVVGGFHVPAGTRLWVNVWKMQRDPNVWADPMVFRPERFLSHGQKKMVDVRGKNYELLPFGAGRRICPGISFSLDLMQLVLTRLILEFEMKSPSGKVDMTATPGLMSYKVVPLDILLTHRRIKSCVQLASSERDMESSGVPVITLRSGKVMPVLGMGTFEKAGKGSERERLAILKAIEVGYRYFDTAAAYETEEVLGEAIAEALQLGLIKSRDELFISSMLWCTDAHPDRVLLALQNSLRNLKLEYVDLYMLPFPASLKPGKITMDIPEEDICPMDYRSVWSAMEECQNLGLTKSIGVSNFSCKKLEELMATANIPPAVNQVEMSPAFQQKKLREYCNANNILVSAVSILGSNGTPWGSNAVLGSEVLKKIAMAKGKSVAQVSMRWVYEQGASLVVKSFSEERLRENLNIFDWQLTKEDNEKIGEIPQCRILSAYFLVSPKGPFKSQEELWDDKA

SEQ ID NO: 144 - DNA, 2664 bp, Papaver bracteatum
atggaattgcaatacttctcctacttccaacctacctcttctgttgttgctttgttgttggcattggtcagtatcttgttttccgttgttgttttgagaaagaccttctccaacaactattcttctccagcttcttctactgaaaccgctgttttgtgtcatcaaagacaacaatcttgcgccttgccaatttctggtttgttgcatgttttcatgaacaagaacggtttgatccatgttaccttgggtaatatggctgataagtacggtccaattttctcttttccaaccggttctcatagaaccttggttgtttcttcttgggaaatggtcaaagaatgtttcaccggtaacaacgataccttctttagtaacagaccaattccattggccttcaagattattttctatgccggtggtgttgactcttatggtttggctttggttccatacggtaaatattggagagaattgagaaagatctgcgtccacaacttgttgtccaatcaacaattattgaagttcagacacttgatcatctcccaagttgatacctccttcaacaagttatacgaattgtgcaagaactccgaagataatcaaggtatggttagaatggatgattggttggctcaattgtccttctcagttattggtagaatcgtttgcggtttccaatctgatccaaaaactggtgctccatctagagtcgaacaattcaaagaagctattaacgaagcctcctacttcatgtctacttctccagtttctgataacgttccaatgttgggttggatcgatcaattgactggtttgactagaaacatgacccattgtggtaagaagttggatttggttgtcgaatccatcatcaacgatcacagacaaaagagaagattctccagaacaaaaggtggtgacgaaaaggatgatgaacaagatgatttcatcgacatctgcttgtccattatggaacaaccacaattgccaggtaacaacaatccaccaaaaatcccaatcaagtccatcgttttggatatgattggtggtggtactgataccactaagttgactactatttggaccttgtccttgttgttgaacaacccacatgttttggacaaggctaaacaagaagttgacgctcatttcttgaccaagagaagaagtacaaacgacgctgctgttgttgatttcgatgacattagaaacttggtctacatccaagccattatcaaagaatccatgagattatacccagcctctccagttgttgaaagattgtctggtgaagattgtgttgttggtggttttcatgttccagctggtactagattgtgggttaatgtttggaagatgcaaagagatcctaacgtttgggctgatccaatggtttttagaccagaaagattcttgtcccacggtcaaaaaaagatggttgatgttagaggtaagaactacgaattattgccatttggtgccggtagaagaatttgtccaggtatttctttctccttggatttgatgcaattggtcttgaccagattgatcttggaattcgaaatgaagtctccatccggtaaggttgatatgactgctactccaggtttgatgtcttacaaagttgttccattggacatcttgttgacccatagaagaatcaagtcttgcgttcaattggcctcttctgaaagagatatggaatcttctggtgttccagttatcactttgagatctggtaaagttatgccagttttgggtatgggtacttttgaaaaagctggtaagggttccgaaagagaaagattggctattttgaaggccatcgaagttggttacagatactttgatactgctgctgcttacgaaaccgaagaagttttaggtgaagctattgctgaagccttgcaattgggtttaatcaagtcaagagatgaattattcatttcctccatgttgtggtgtactgatgctcatccagatagagttttgttggcattgcaaaactcattgagaaacttgaagttggaatacgtcgacttgtacatgttgccatttccagcttcattgaagccaggtaagattaccatggatatcccagaagaagatatctgcccaatggattatagatctgtttggtctgctatggaagaatgccaaaatttgggtttgaccaagtccattggtgtctctaatttctcctgcaaaaagttggaagaattgatggctactgctaacattccaccagctgtaaatcaagttgaaatgtctccagctttccaacaaaagaagttgagagaatactgcaacgctaacaacattttggtttccgccgtttctattttgggttctaatggtactccatggggttcaaatgctgttttaggttctgaagtcttgaaaaagattgctatggccaagggtaaatccgttgctcaagtttcaatgagatgggtttatgaacaaggtgcttccttggttgttaagtcctttagtgaagaaagattaagagaaaacttgaacatcttcgactggcaattgaccaaagaagataacgaaaagatcggtgaaatcccacaatgcagaattttgtctgcttacttcttggttagtccaaagggtccattcaagtctcaagaagaattatgggatgataaggcttaa

SEQ ID NO: 145 - protein, 413 aa, Papaver bracteatum
DNAREVLVNKSADYSARDVPDILKIITANGKNIADCDSGPFWHHLKKGLQSCINPSNVMSLSRLQEKDMQNLIKSMQERASQQNGILKPLDHAKEASIRLLSRVIFGQDFSNEDLVIGVKDALDEMVRISGLASLADAFKIAKYLPSQRKNIRDMYATRDRVYNLIQPHIVSNLPANSFLHFLTSQDYSDEIIYSMVLEIFGLGVDSTAATAVWALSFLVGKQEIQEKLYREINNLTGGQRPVKVADLKELPYLQAVMKETLRMKPIAPLAVPHVAVKDTTFKGRRIVKGTKVMVNLYAIHHDPNVFPAPYKFIPERFLKDVNSDGRFGDINTMESSLIPFGAGMRICGGVELAKQMVGFALASMVNEFKWDCVSEGKLPDLREAVSFILYMKNPLEAKITPRDARSYKTFGQ

SEQ ID NO: 146 - DNA, 1521 bp, Papaver bracteatum
atggccccaatcaacatcgaagaaaacgatttttggatgattgcctgcaccgttattatcgtttttgccttggttaagttcatgttcagcttctaccaatctgctaacactactgaatggccagaaggtccaaaaaccttgccaattattggtaacttgcaccaattaggtggtggtgttccattgcaagttgctttggctaatttgtctaaagtttacggtggtgctttcaccatttggattggttcttgggttccaatgatcgttatctccgatattgataacgccagagaagttttggttaacaagtctgctgattactccgctagagatgttccagatattttgaagattattaccgccaacggtaagaacattgctgattgtgattctggtccattctggcatcatttgaagaagggtttacaatcctgcatcaacccatctaacgttatgtctttgtccaggttgcaagaaaaggacatgcagaacttgattaagtccatgcaagaaagggcttctcaacaaaatggtatcttgaagccattggatcatgctaaagaagcctctattaggttgttgtccagagttattttcggtcaggatttctccaacgaagatttggttattggtgttaaggatgccttggacgaaatggttagaatttctggtttggcttctttggctgatgctttcaaaattgctaagtacttgccaagccagagaaagaacattagagatatgtacgctaccagagacagagtctacaatttgattcaaccacacatcgtgtctaacttgccagctaattcattcttgcatttcttgacctctcaagactactccgacgaaattatctactccatggttttggaaatcttcggtttgggtgttgattctactgctgctacagctgtttgggctttgtcttttttggttggtaagcaagagatccaagagaagttgtacagagagattaacaacttgactggtggtcaaagaccagttaaggttgctgatttgaaagagttgccatacttgcaagccgttatgaaagaaaccttgagaatgaagccaattgctccattggctgttccacatgttgcagttaaggataccacttttaagggtagaagaatcgtcaagggtactaaggttatggttaacttgtacgccattcatcacgatccaaatgtttttccagctccatacaagttcatcccagaaagatttttgaaggacgttaactccgatggtagattcggtgatattaacaccatggaatcctcattgattccatttggtgctggtatgagaatttgcggtggtgttgaattggctaaacaaatggttggtttcgctttggcctctatggttaatgaattcaagtgggattgtgtctctgagggtaaattgccagatttgagagaagctgtctctttcatcttgtacatgaagaatccattggaggctaagattactccaagagatgctagatcttacaagacctttggtcagtaa

SEQ ID NO: 147 - protein, 474 aa, Papaver somniferum
MATMYSAAVEVISKETIKPTTPTPSQLKNFNLSLLDQCFPLYYYVPIILFYPATAANSTGSSNHHDDLDLLKSSLSKTLVHFYPMAGRMIDNILVDCHDQGINFYKVKIRGKMCEFMSQPDVPLSQLLPSEVVSASVPKEALVIVQVNMFDCGGTAICSSVSHKIADAATMSTFIRSWASTTKTSRSGGSTAAVTDQKLIPSFDSASLFPPSERLTSPSGMSEIPFSSTPEDTEDDKTVSKRFVFDFAKITSVREKLQVLMHDNYKSRRQTRVEVVTSLIWKSVMKSTPAGFLPVVHHAVNLRKKMDPPLQDVSFGNLSVTVSAFLPATTTTTTNAVNKTINSTSSESQVVLHELHDFIAQMRSEIDKVKGDKGSLEKVIQNFASGHDASIKKINDVEVINFWISSWCRMGLYEIDFGWGKPIWVTVDPNIKPNKNCFFMNDTKCGEGIEVWASFLEDDMAKFELHLSEILELI

SEQ ID NO: 148 - DNA, 1425 bp, Papaver somniferum
atggccactatgtactcagcagccgtggaagttatatcgaaggagacaatcaaacccacaacccccactccaagccagctgaagaacttcaacttaagtcttttagatcagtgctttcccttgtactactatgttcccataattttgttctatccggcaaccgctgcgaactccactggctcgagtaatcaccatgacgaccttgatttgctgaaaagctctttgtctaaaacattagtccatttctacccaatggctggaagaatgatagataatatcctagtagactgccacgaccagggaataaacttttataaggtaaagattcgaggcaagatgtgcgaatttatgtcccagccagacgtgccgctctcccagttacttccgtcagaggtggtatccgcttccgtaccaaaggaagcattggtcattgtccaagttaatatgttcgattgcggcggaaccgctatttgctcgtccgtatcgcacaagattgccgacgctgcgactatgagcacgttcattaggagctgggccagtacaactaaaacttcacgcagtggtggctcaacggcagctgtaacggatcaaaagctaatcccatcatttgattccgcctctttgttcccaccttccgagagattgacttcaccctcaggtatgagcgagatcccattttcctctactccggaagatactgaggatgacaaaactgttagtaagcgttttgtctttgactttgcgaagattacatccgtacgagagaaattacaggttttgatgcatgataactataaatccaggcgccagaccagagttgaggtagtgacatcgttgatttggaaatctgtaatgaagtctactcctgccggcttcctaccagtagttcaccatgcagttaatttacgtaagaaaatggacccaccactacaggatgtgtcttttggtaatttgtcggtcactgtatctgccttcctgccagctaccactaccaccaccactaacgctgtaaacaagacaataaacagcacgtctagcgaatcacaggtggttttacacgaactgcatgacttcatcgcgcagatgagatctgagatagacaaagttaagggagacaaaggtagccttgagaaggtcatccaaaacttcgcaagtggtcacgacgccagtataaagaaaattaacgacgtcgaggtaataaatttctggatctcttcctggtgtaggatggggttatacgagatcgatttcggatggggtaagcctatctgggttacagtagatcctaacattaaacctaacaagaactgcttctttatgaacgatacgaagtgtggcgagggtatagaggtgtgggcgtcattcttagaggatgatatggccaagttcgaattacacttgtctgagatacttgagttaatatag

SEQ ID NO: 149 - protein, 311 aa, Papaver bracteatum
MPETCPNTVTKMRCAVVTGGNKGIGFEICKQLSSSGIMVVLTCRDVTRGLEAVEKLKNSNHENVVFHQLDVTDPITTMSSLADFIKARFGKLDILVNNAGVAGFSVDADRFKAMISDIGEDSEEVVKIYEKPEAQELMSETYELAEECLKINYYGVKSVTEVLLPLLQLSDSPRIVNVSSSTGSLKYVSNETALEILGDGDALTEERIDMVVNMLLKDFKENLIETNGWPSFGAAYTTSKACLNAYTRVLAKKIPKFQVNCVCPGLVKTEMNYGIGNYTADEGAKHVVRIALFPDDGPSGFFYDCSELSAF

SEQ ID NO: 150 - DNA, 936 bp, Papaver bracteatum
atgccagagacttgtccaaacactgtaacaaagatgcgttgtgctgtagttacgggtggtaataaaggtataggtttcgagatctgcaagcagctatcaagctctggcattatggtcgtcctaacttgccgcgacgttacgagaggcttagaagcggttgagaaacttaagaactcaaaccacgagaatgtagtgtttcatcagctggatgttactgacccgataacgacgatgagtagcttagctgatttcattaaggcaaggttcggcaagctggacatattggtaaacaacgcgggcgttgctggattctccgtagacgccgatagattcaaggctatgatcagtgacataggtgaagattcagaagaggttgtgaagatttatgaaaagccagaagcacaggagttgatgtcagagacctacgagcttgctgaggaatgtctgaagatcaattattatggtgtgaagagcgttacggaagtcttgttgccgctacttcaattgtcggattccccgcgcatcgttaacgtctcgagctctactgggagcctaaagtatgtatccaatgaaacggcattagagatattgggtgacggagatgctttgacggaagaaaggatcgacatggttgttaatatgcttttaaaagactttaaagagaatttgatagagacaaacggatggccctcttttggtgcggcttataccacgagtaaggcgtgcctgaatgcctacacccgcgttttagccaagaaaataccaaagttccaggtgaactgtgtgtgcccggggctagtaaagactgagatgaactatggaatcggtaattacaccgccgatgaaggagcgaagcatgtggtccgtattgctctctttcctgatgacggcccgtctggcttcttttacgactgctccgagttatccgcgttttag

SEQ ID NO: 151 - protein, 180 aa, Papaver somniferum
MDSINSSIYFCAYFRELIIKLLMAPPGVSGLVGKLSTELEVNCDAEKYYNMYKHGEDVQKAVPHLCVDVKVISGDPTRSGCIKEWNVNIDGKTIRSVEETTHNDETKTLRHRVFEGDMMKDFKKFDTIMVVNPKPDGNGCVVTRSIEYEKTNENSPTPFDYLQFGHQAIEDMNKYLRDSE

SEQ ID NO: 152 - DNA, 543 bp, Papaver somniferum
atggactccatcaactcctctatctacttctgtgcttacttcagggaactgatcatcaagttgttgatggctccaccaggtgtttctggtttggttggtaaattgtctaccgaattggaagttaactgtgacgctgaaaagtactacaacatgtacaaacacggtgaagatgttcaaaaggctgttccacatttgtgcgttgatgttaaggttatttctggtgatccaactagatccggttgtatcaaagaatggaacgttaacattgacggtaagaccatcagatctgttgaagaaactactcacaacgacgaaactaagaccttgagacatagagttttcgaaggtgatatgatgaaggacttcaaaaagttcgataccatcatggttgttaacccaaagccagatggtaatggttgtgttgttaccagatccatcgaatacgaaaagaccaacgaaaattctccaactccattcgactacttgcaatttggtcatcaagccatcgaagatatgaacaaatacttgagggactccgagtaa

SEQ ID NO: 153 - protein, 518 aa, Heliothis virescens
MITTLLLFSLFVLITALYFVLKKKFQYWEKRNVPHVPPVPLLGNFAKYILQKEFIGHTAQEICSKFPNEPVVGAYYATEPALMVQDPELIKLVVTKDFYFFNGHEISEFAHRERLGKNLFASYGDKWKVLRQNLTPIFTSSKMKNMFHLIEKCSHDFEDLLDKEARKDKEVEMRSLIARFTMDGIGNCAFGIHTHTMEQSENNPFTTIGNAFFFHNWYRSFQLVLRTIYPSIFYGLGYKFIHTEAEDFFTNMLTEIFKARDYTPTNRNDFVDLMLKFKTKKTMVGDSLQNIKTDDRKKVELQVDDDLLIAQCVLFFTAGFETSATTLSFTLYELAKHPEAQKRAIAEVDDYLQRHNNELKYECLSEMPFIEACFDETLRMYPAAGLLLREVIQDYTFPSGLKVEKGLRVFVPLYHLHHNPAFFPDPEEYRPERFLPENKHNIRPYTYMPFGDGPRICIGMRFAKMQMTAGIITVLKKYRLELAPGMKTKVEFTPNSIITQVKGGIKLNMIEREGWEQR

SEQ ID NO: 154 - DNA, 1557 bp, Heliothis virescens
atgatcaccaccttgctgctgttttctttgttcgttttgattaccgccttgtacttcgtcttgaagaagaagtttcaatactgggagaagagaaacgttccacatgttccaccagttccattattgggtaatttcgctaagtacatcctgcagaaagaattcattggtcataccgctcaagaaatctgttctaagtttccaaacgaaccagttgttggtgcttattatgctactgaaccagctttgatggttcaagatccagaattgatcaagttggttgttaccaaggacttctactttttcaacggtcacgaaatttccgaattcgcccatagagaaagattgggtaagaatttgtttgcctcctatggtgataagtggaaggttttgagacaaaacttgaccccaattttcacctcctctaagatgaagaatatgttccacttgatcgagaagtgctcccatgattttgaagatttgttggacaaagaagcccgtaaggacaaagaggttgaaatgagatctttgattgccagattcaccatggatggtattggtaattgtgccttcggtattcatactcacactatggaacaatccgaaaacaacccattcactactattggtaacgctttcttcttccacaactggtacagatctttccaattggtcttgagaactatctacccctctattttctatggtttgggctacaagttcattcatactgaagctgaagatttcttcacgaacatgttgaccgaaattttcaaggctagagattacaccccaactaacagaaacgatttcgttgacctgatgttgaagttcaagactaagaaaactatggtcggtgactccttgcaaaacattaagactgatgataggaagaaggtcgaattgcaagttgatgatgatttgttgattgcccaatgcgttttgtttttcactgctggttttgaaacctctgctactactttgtctttcaccttgtacgaattggccaaacatccagaagctcaaaaaagagctattgccgaagttgacgattacttgcaaagacacaacaacgaattgaagtacgaatgcttgtctgagatgccattcattgaagcttgtttcgacgaaaccttgagaatgtatccagctgcaggtttgttgttgagagaagttattcaggattacactttcccatccggtttgaaagttgaaaagggtttgagagttttcgttcccttgtatcacttgcatcataatccagcatttttcccagatcctgaagagtatagaccagaaagatttctgccagaaaacaagcacaacattagaccatatacctacatgccatttggtgatggtccaagaatctgtattggtatgagattcgctaagatgcaaatgaccgctggtattattaccgtgttgaagaagtacagattggaattggctccaggtatgaaaactaaggttgaattcaccccaaactccattatcactcaagtaaaaggtggcatcaagctgaacatgattgaaagagaaggttgggaacagaggtga

SEQ ID NO: 155 - protein, 522 aa, Helicoverpa armigera
MIVLLSIVLPLIFCAFYLLATRKFQYWEKKKVPYIKPVPIFGNFSEYILQQKFIGEVVKEICQKFPNEPLIGAYYGTEPTLIVQDPELIKLVMTKDFYYFNGREVSDYSHRELFSRNLFATHGDQWKVLRQNLTPLFSSAKMKNMFHLIGKCSLVFEKVLDKETQKGDEIEVRALLAAYTMDCIGSCVFGVDTNVMEKKENNPFKNVGDVIFQSNKLRALKLVVRSIWPAIFFGLGFNTQPAEVKNFFTNLMTGIFSARQYTPTNRNDFVDLVLKLKNNKTMVGDSFNHMKGESAAKVTLDVDDELLIAQCFLFFAAGYETSATTLNYTLYELAKNPEAQEKALAEVDDYLRRNDNTLKYECVAETPYLEACTNEALRLYPVLAIPTREVMDDYTFPSGLKVEKGLRIHLPAYHLQRSPEYFPDPEKFQPERFLPENKQNIRQYTYFPFGDGPRVCIGIRFARMQMAAGLITLLKKYRVELAPGMKREVVFQPTSVVTQPIGGIRLKFVERENWEQRLLKSS

SEQ ID NO: 156 - DNA, 1569 bp, Helicoverpa armigera
atgatcgtcctgttgtccatcgttttgccattgattttttgcgccttttacttgttggctaccagaaagtttcaatactgggaaaagaagaaggtcccttacattaagccagttccaattttcggtaacttctccgagtatatcttgcagcaaaagttcattggtgaagtcgtcaaagaaatctgccaaaagtttccaaacgaaccattgattggtgcttattacggtactgaacctaccttgatagttcaagatccagagttgatcaagctggttatgactaaggatttctactacttcaacggtagagaagtctccgattattctcatagagagttgttctccagaaacttgtttgctactcatggtgatcaatggaaggtcttgagacaaaatttgacccctttgttctcctcagctaagatgaagaatatgttccacttgatcggtaagtgctccttggtttttgaaaaggtgttggacaaagaaacccaaaagggtgacgaaattgaagttagagctttgttggctgcttacaccatggattgcattggttcttgtgtttttggtgttgataccaacgtcatggaaaagaaagaaaacaacccattcaagaacgttggtgacgttatcttccaatccaacaaattgagagccttgaagttggttgttagatctatttggccagccatttttttcggtttgggttttaatactcaaccagccgaagttaagaacttcttcactaatttgatgaccggtatcttctctgctagacagtatactccaactaacagaaacgatttcgttgacctggttctgaagttgaagaacaacaaaactatggtcggtgactccttcaatcatatgaagggtgaatctgctgctaaggttactttggatgttgatgatgagttgttgattgcccaatgctttttgttttttgctgctggttacgaaacttctgctactactttgaattacaccttgtacgagttggctaagaatccagaagctcaagaaaaagctttggccgaagttgatgattacttgagaagaaacgataacaccttgaagtacgaatgtgttgctgaaactccatacttggaagcttgtactaatgaagctttgaggttgtatccagttttggctattccaaccagagaagttatggatgattacacttttccatccggtttgaaggttgaaaagggtttgagaattcatttgccagcttaccacttgcaaagatccccagaatattttccagatccagaaaagttccagccagaaagatttttgccagaaaacaagcaaaacatcaggcagtacacttactttccatttggtgatggtccaagagtctgcattggtattagatttgctagaatgcaaatggctgccggtttgattactttgttgaagaagtacagagttgaattggctccaggtatgaagagagaagttgttttccaacctacttctgttgttacccaacctattggtggtatcagattgaagttcgtcgaaagagaaaattgggaacagaggttgttgaagtcctcttga

SEQ ID NO: 157 - protein, 523 aa, Rhizopus microsporus
MNSLINIYTTSFKRLLPLIKDRSKTLCITAAILLVALQQIRSFFYVPKSIRSIPKVSYLSMAISFLYREGPPERLKRLKLPAMRKGNGFYLSRIPFGWTVYVANPIAAKQLLLKAENFPKSHFLMETVGKDSPFVQFLGPDNVVNSNGENWKKQRKVMNPAFHRSMPVKTIAGVIPTLFAVIDKYEGKVPVTSIMQEFTLDVLGLAIFDFDFGSLKGDAEKWRAEYKLVMETLFDPVTNVFTGLDFLLRYVYPKRIRGAKAVNNLNKLFDKLVKEKRLEVQNGVHVNKPQDEKDLLTLMLEAEQKGEAMTTDMEMRHNVAVFFLAGHESTAHVLSFTLYFLAKNKHVQQKLREEVNRVMGRESVDAAPTLEELRQMEYLYAVIKESLRLCSIFDVLILRDTVEDMYLDDTFIPKGTRITVDVSAIQRDSKVWSKPDDFIPERFMEGGEAEGHEGMTWLPFGGGARQCIGMNFSLTEQKVALAMLVQRYDIDVPKDSIHYENIVYERPFYLAPQSLELKFTKLH

SEQ ID NO: 158 - DNA, 1572 bp, Rhizopus microsporus
atgaactccctgatcaacatctacaccacatcttttaagaggctgttgccattgatcaaggatagatctaagaccttgtgtattaccgctgccattttgttggttgccttgcaacaaattaggtcctttttctacgtccccaaatccatcagatctattccaaaggtttcctacttgtccatggccatttcattcttgtatagagaaggtccaccagaaagattgaagaggttgaaattgccagctatgagaaaaggtaacggcttctacttgtctagaattccatttggttggaccgtttacgttgctaatccaattgctgctaaacagttgttgttgaaggctgaaaatttccccaagtctcacttcttgatggaaactgttggtaaggattctccattcgttcaatttttgggtccagataacgttgtcaactctaatggtgaaaactggaaaaagcagcgtaaggttatgaatccagctttccatagatcaatgccagttaagactattgccggtgttattccaactttgttcgccgttattgataagtacgaaggtaaggttccagtcacctctattatgcaagaattcaccttggatgttttgggtttagccatcttcgattttgacttcggttctttgaaaggtgatgctgaaaaatggcgtgctgagtacaaattggttatggaaactttgtttgacccagtcactaacgttttcactggtttggatttcttgttgagatacgtctaccctaagagaattagaggtgctaaggctgttaacaacctgaacaagttgtttgacaagttggtcaaagaaaagaggttggaagttcaaaacggtgttcatgttaacaagccacaagacgaaaaggatttgttgaccttgatgttggaagctgaacaaaaaggtgaagctatgactaccgatatggaaatgagacataacgttgccgtttttttcttggctggtcatgaatctactgcccatgttttgtctttcaccttgtactttttggccaagaacaagcacgttcaacagaagttgagagaagaggttaatagagtcatgggtagagaatctgttgatgctgctccaactttagaagaattgagacagatggaatacttgtacgccgtcatcaaagaatccttgagattgtgctctatcttcgacgttttgatcttgagagataccgtggaagatatgtacttggatgataccttcattcccaagggtactagaattaccgttgatgtttctgccatccaaagagattcaaaggtttggtctaagccagatgatttcattccagaaaggtttatggaaggtggtgaagctgaaggtcacgaaggtatgacttggttgccatttggtggtggtgctagacaatgtattggtatgaatttctccctgaccgaacaaaaggttgctttggctatgttggttcaaagatacgatatcgatgttcccaaggactctatccattacgaaaacatcgtttacgaaaggccattttacttggctccacaatctttggaattgaagttcaccaagttgcactaa

SEQ ID NO: 159 - protein, 687 aa, Helicoverpa armigera
MSDSAQDVLKDAATGAAAAAAAGGSLFSTFDIIVLVILLGGTIWWLYNSKKENKKDEILLSKYSIQAAGSIQVTENSFINKLKSSGRSLVVFYGSQTGTGEEFAGRLAKEGIRYKMKGMVADPEECDMEELMKLQDIPNSLAVFCMATYGEGDPTDNSMEFYEWLKNGEPDLTGLNYAVFGLGNKTYEHYNAVAIYLDKRLEELGATRVYELGLGDDDANIEDDFITWKDKFWPAVCEKFNIESTGEEELIRQFRLVTHAPGDIQPNNVFTGEIARLHSLQVQRPPYDAKNPFLAQITVNRELHKGGDRSCIHVELDISDSKMRYEAGDHVAVYPINDTNLVERLGQLTGANLDEIFSLINTDQESSKKHPFPCPTSYRTALSHYVEITALPRTHILRELVEYCSDEEDKKKLMLMATNSQEGKALYQSFIVDACRNIVHILEDIPSCKPPLDHLCELLPRLQPRYYSISSSPKMYPETVHITAVIVKYKTPTGRVNKGVTTTWLAENKPEPGKPLPRVPVYIRKSQFRLPLQTQTPIIMVGPGTGLAPFRGFLQERAFARANGKEVGESVLYFGCRHRDQDYIYQDELEKYEQNGDVKLNLAFSRDQKEKVYVTHLLEKDMDLLWDVIGNRNGHFYICGDAKNMAVDVRNIVLKAIQEKGGRTESEAVQFIKKLESMKKYSADVWS

SEQ ID NO: 160 - DNA, 2064 bp, Helicoverpa armigera
atgtccgattccgctcaagatgttttgaaagatgctgctactggtgctgctgctgcagctgccgctggtggttctttgttttctacttttgatatcatcgtcctggtcatcttgttaggtggtactatttggtggctgtacaactccaaaaaagagaacaagaaggacgagatcctgctgtctaaatactctattcaagctgccggttccattcaagttactgaaaactctttcatcaacaagctgaagtcctctggtagatctttggttgttttttacggttctcaaaccggtactggtgaagaatttgctggtagattggctaaagaaggtatcaggtacaaaatgaagggtatggttgctgatcctgaagaatgtgatatggaagagttgatgaagttgcaggatatcccaaattcattggctgttttctgtatggctacttacggtgaaggtgatccaactgataatagcatggaattctacgagtggttgaagaatggtgaaccagatttgactggtttgaactacgctgtttttggtttgggtaacaagacctacgaacattacaatgctgttgctatctacttggacaagaggttggaagaattgggtgctactagagtttacgaattaggtttgggtgatgatgatgccaacatcgaagatgatttcattacctggaaggataagttttggccagctgtttgtgaaaagttcaacattgaatctaccggcgaagaagaattgatcagacaattcagattggttactcatgccccaggtgatattcaacctaacaatgttttcactggtgaaatcgccagattgcactctttacaagttcaaagaccaccatacgatgctaagaatccattcttggctcaaatcaccgttaacagggaattgcacaaaggtggtgatagatcttgcatccatgttgaattggatatctccgactctaagatgagatatgaagctggtgatcatgttgctgtttacccaatcaatgataccaacttggttgaaagattgggtcaactaactggtgctaatttggacgaaatcttctccttgattaacaccgaccaagagtcctctaagaaacatccatttccatgtccaacatcttacagaactgctttgtctcactacgttgaaattactgctttgccaagaacgcatatcttgagagaattggttgaatactgctctgatgaagaggacaagaaaaagttgatgttgatggctaccaacagccaagaaggtaaagccttgtatcaatcctttatcgttgatgcctgtagaaacatcgttcacatcttggaagatatcccatcttgtaaaccaccattggatcatttgtgcgaattgctaccaagattgcagccaagatattactccatttcctcctctccaaaaatgtacccagaaaccgttcatattaccgccgttatcgttaagtacaaaactccaactggtagagttaacaagggtgttactactacttggttggctgaaaacaaaccagaaccaggtaaaccattgccaagagttccagtttacattaggaagtctcagttcagattgccattgcaaactcaaaccccaattatcatggttggtccaggtactggtttggctccttttagaggttttttacaagaaagagctttcgctagagccaacggtaaagaagttggagaatctgtcttgtacttcggttgtagacatagagatcaagactacatctaccaagacgaattggaaaagtacgaacaaaacggtgatgtgaagttgaacttggccttttccagagatcaaaaagaaaaggtttacgtcacccacttgttggaaaaggatatggatttgttgtgggatgtcatcggtaatagaaacggtcatttctacatttgcggtgacgctaagaatatggctgttgatgttagaaacattgtcctgaaggccattcaagagaaaggtggtagaactgaatctgaagctgttcagttcatcaaaaagttggagtccatgaagaaatactccgctgatgtttggtcttaa

SEQ ID NO: 161 - protein, 573 aa, Cunninghamella elegans
DNAVDFWEQFITDESPVFSEGGETLENLRYLMFGLGNKTYEHYNAVARILDKKLTGLGAKRIGERGEGDDDGSLEEDFLAWQESMWPTFCDALGVDENNAQQGPRQASYSVDELKEEYKNDDVYFGELGTKSKDSSRVVYDAKRPYNAPITTRELFNSSERHCLHVDIDISGTNLSYQTGDHVAMWPTNNEDEVLRLANILGLQDKLDNVISVKAIDPAAPKQHPFPVPTTYRAIFRHYIDICAPASRQSLMSFVEFAPTDSAKDLLKLLATDKDEYRLKVGEAVRNLGEVLELVSGNDKDTQPGSFTSVPFDLIVETIPRLQPRYYSISSSSKENSSIISATCVTLAYQPDPTPDRTVYGVNTNFLYRIHTQSSDNDIQGLPKYDLAGPRKAFLNEQGQSHKLPIHIRRSQFKLPRNTSCPVIMIGPGTGVAPFRGFVRERALQKKEGKSVGPTVLFFGNRHSEHDFLYSDEWPELFNTLGDDSKLITAFSRETEHKVYVQHRLEENGKDIWQLLEKGAYIYVCGDARNMARDVNQTFVNLAMEYGEKTEQKALDYVKSLRNTGRYQEDVWS

SEQ ID NO: 162 - DNA, 2133 bp, Cunninghamella elegans
atggctcaacaaactccagctgttattgatactttggatttgattttgttgggttctattggtttgggtactattgcttggtttactagaagacaattgtctgaaagattgtttggtactggtcaatctaatgctactccaaaaccaactactccacaagctccaaaaagagaaagaaattttgttaaagttatggaacaacaaggtagaaaagttatttttttttatggttctcaaactggtactgctgaagattttgcttctagattggctaaacaatgttctcaaaaatatggtgtttcttgtatgactgctgatattgaaatgtatgatttgtcttatttggatactttgtctgaagattctttggtttgttttgttatggctacttatggtgaaggtgaaccaactgataatgctgttgatttttgggaacaatttattactgatgaatctccagttttttctgaaggtggtgaaactttggaaaatttgagatatttgatgtttggtttgggtaataaaacttatgaacattataatgctgttgctagaattttggataaaaaattgactggtttgggtgctaaaagaattggtgaaagaggtgaaggtgatgatgatggttctttggaagaagattttttggcttggcaagaatctatgtggccaactttttgtgatgctttgggtgttgatgaaaataatgctcaacaaggtccaagacaagcatcttattctgttgatgaattgaaagaagaatataaaaatgatgatgtttattttggtgaattgggtactaaatctaaagattcttctagagttgtttatgatgctaaaagaccatataatgctccaattactactagagaattgtttaattcttctgaaagacattgtttgcatgttgatattgatatttctggtactaatttgtcttatcaaactggtgatcatgttgctatgtggccaactaataatgaagatgaagttttgagattggctaatattttgggtttgcaagataaattggataatgttatttctgttaaagctattgatccagctgctccaaaacaacatccatttccagttccaactacttatagagctatttttagacattatattgatatttgtgctccagcttctagacaatctttgatgtcttttgttgaatttgctccaactgattctgctaaagatttgttgaaattgttggctactgataaagatgaatatagattgaaagttggtgaagctgttagaaatttgggtgaagttttggaattggtttctggtaatgataaagatactcaaccaggttcttttacttctgttccatttgatttgattgttgaaactattccaagattgcaaccaagatattattctatttcttcttcttctaaagaaaattcttctattatttctgctacttgtgttactttggcttatcaaccagatccaactccagatagaactgtttatggtgttaatactaattttttgtatagaatccatactcaatcttctgataatgatattcaaggtttgccaaaatatgatttggctggtccaagaaaagcatttttgaatgaacaaggtcaatctcataaattgccaattcatattagaagatctcaatttaaattgccaagaaatacttcttgtccagttattatgattggtccaggtactggtgttgctccatttagaggttttgttagagaaagagctttgcaaaaaaaagaaggtaaatctgttggtccaactgttttgttttttggtaatagacattctgaacatgattttttgtattctgatgaatggccagaattgtttaatactttgggtgatgattctaaattgattactgctttttctagagaaactgaacataaagtttatgttcaacatagattggaagaaaatggtaaagatatttggcaattgttggaaaaaggtgcttatatttatgtttgtggtgatgctagaaatatggctagagatgttaatcaaacttttgttaatttggctatggaatatggtgaaaaaactgaacaaaaagcattggattatgttaaatctttgagaaatactggtagataccaagaagatgtttggtcttag

SEQ ID NO: 163 - protein, 1289 aa, Camellia japonica
MAEENGLDGDLNNHQATASTSNSPVQGANGTSETKGAQEKSEKSKEEEKIGQSVPYYKLLSFADSKDVLLMVIGTIAAVANGASMPVMTLLLGDLINAFGQNANNTDTLRVVSKVALKFVYLSIGAGVASFFQVACWMVTGERQAARIRSLYLKTILRQDVAFFDKETNTGEVVGRMSGDTVLIQDAIGEKVGKFIQLFSTFIGGFLIAFVKGWLLTLVMLTSIPPLVFCGALMTITISKMASRGQVAYSQAGIVVEQTIGSIRTVASFTGEKHAVTQYEKYLNKAYLAGIHEGLASGVGLGSVLLVIFCSYSLAVWFGGKMIIEKGYNGGNVINIIVAVLTGSMSLGQASPCLGAFAAGQAAAYKMLETIKRKPEIDSYDTSGHKSDDIRGDIELRDVSFTYPARPDEQIFNGFSLFIPSGTTSALVGQSGSGKSTVISLIERFYDPQAGEVLIDGVNLKDFQLRWIRGKIGLVSQEPVLFASSIRDNIAYGKDGATVEEIKAATERANASKFIDKLPQGLDTLVGEHGTQLSGGQKQRIAIARAILKDPRILLLDEATSALDAESEHIVQEALDRIMVNRTTVIVAHRLSTVRNADTIAVIHRGKIVEKGSHLDLLLNPDGAYCQLIRLQEIGRSEVDKAENVESGLNSSQQHSIGRSISRGSSGVGNSSRHSFSVSFGLPTGHIYETTAGLESTSPAPIGQTQEVPLRRLATLNKPEIPVLLLGVISAMVNGVIFPIFGVLLSSVIKTFYEPEDKLRKDTRFWAFMFIILGVASFVAAPATAYFFAVAGCRLIQRIRSMCFRTVAHMEIDWFDEPEHASGAIGAKLSADASTVRGLVGDALALLVQNAATAVCGLVIAFVANWTLALIILVLIPLIGVNGYVQMKFMKGFSADAKMMYEEASQVANDAVGSIRTVASFCAEEKVMQLYKKKCEGPMKTGIRQGLISGIGFGISFFLLFNVYATSFYAGARLVDAGKTTFSDVFRVFFALTMAALGISQSSSLAPDSSKAKSSTASIFGILDRKSKIDSSDESGMTVENVKGEIELRHISFKYPTRPDIQIFRDLSLAIHSGKTVALVGESGSGKSTVISLLQRFYDPDSGHITLDGIEIQKFQLRWLRLQMGLVSQEPVLFNETIRANIAYGKEGDATETEILAAAELANAHKFISGLQQGYDTVVGERGIQLSGGQKQRVAIARAMVKAPKILLLDEATSALDAESERVVQDALDKVMVNRTTVWVAHRLSTIKNADVIAVVKNGVIAEKGKHNDLINVKDGVYASLVALHTSAS

SEQ ID NO: 164 - DNA, 3870 bp, Camellia japonica
atggccgaggagaacggtttggatggtgatttgaacaaccatcaagctactgcttctacttctaactctccagttcaaggtgctaatggtacttctgaaacaaaaggtgctcaagagaagtccgaaaagtccaaagaagaagaaaagatcggtcaatccgttccttactacaagttgttgtctttcgctgattccaaggatgttttgttgatggttattggtactattgctgctgttgcaaatggtgcttctatgccagttatgactttgttgttgggtgacttgattaacgcttttggtcaaaacgctaacaacaccgatactttgagagttgtttctaaggttgccttgaagttcgtctacttgtctattggtgctggtgttgcttcatttttccaagttgcttgctggatggttactggtgaaagacaagctgctagaatcagatccttgtacttgaaaaccatcttgagacaagatgttgccttcttcgacaaagaaactaacactggtgaagttgtcggtagaatgtctggtgatactgttttgattcaagatgccatcggtgaaaaggtcggtaagttcattcaactgttctctacctttatcggtggtttcttgattgcttttgtcaaaggttggttgttgaccttggttatgttgacttctattccaccattggttttctgtggtgctttgatgactattaccatttccaagatggcttccagaggtcaagttgcatattctcaagctggtatcgttgtcgaacaaaccattggtagtattagaaccgttgcttctttcacaggtgaaaaacatgctgttacccagtacgaaaagtacttgaacaaagcttacttggccggtattcatgaaggtttggcttcaggtgttggtttgggttctgttttgttagttatcttctgctcctactctttggctgtttggtttggtggtaagatgattatcgaaaagggttacaatggtggcaacgtcattaacattatcgttgctgttttgaccggctctatgtctttgggtcaagcttctccatgtttgggtgcttttgctgctggtcaagctgctgcatacaaaatgttggaaaccattaagaggaagccagagatcgattcttatgatacttctggtcacaagtccgatgatatcagaggtgatattgaattgagggatgtctcttttacttacccagctagaccagatgaacaaatctttaacggtttctccttgttcatcccatctggtactacatctgctttggttggtcaatctggttctggtaagtctaccgttatctccttgattgaaagattctacgatccacaagccggtgaagttttaattgatggtgttaacttgaaggacttccagttgagatggattagaggtaaaatcggcttggtttctcaagaaccagttttgttcgcttcctccatcagagataatattgcttacggtaaagatggtgccaccgttgaagaaatcaaagctgctactgaaagagctaacgcctctaaattcattgacaaattgccacaaggtttggataccttggttggtgaacatggtactcaattgtctggtggtcaaaagcaaagaattgctattgctagagccattttgaaggacccaagaatcttgttgttagatgaagctacttcagctttggatgccgaatctgaacatatagttcaagaagccttggacagaatcatggttaacagaactactgttattgtcgcccatagattgtccactgttagaaatgctgataccattgccgttatccatagaggtaagattgtcgaaaaaggttcccacttggacttgttgttgaatccagatggtgcttactgccaattgatcagattgcaagaaatcggtagatccgaagttgataaggctgaaaatgttgagtctggcttgaactcttctcaacaacattctatcggtaggtctatctctagaggttctagtggtgttggtaactcttctagacattccttctctgtttctttcggtttccccaccggccacatctacgagaccactgctggtttggaatctacttctccagctccaattggtcaaactcaagaagttccattgagaagattggctactttgaacaagccagaaattccagtcttgctgttgggtgttatttctgctatggttaacggtgttatcttcccaattttcggtgtcttgttgtcctctgttattaagactttctatgaacccgaggacaagttgagaaaggataccagattttgggctttcatgttcattattttgggtgttgcctcttttgttgctgctccagctacagcttacttttttgctgttgctggttgcagattgatccaaagaattagatctatgtgcttcagaaccgtcgctcatatggaaattgattggtttgatgaaccagaacatgcctctggtgcaattggtgctaaattgtctgctgatgcttctacagttagaggtttggtcggtgatgctttggctttgttggttcaaaatgctgctacagctgtttgcggtttggttattgcatttgttgctaattggaccttggccttgattatcttggttttgatccctttgattggtgtcaacggttacgttcaaatgaagtttatgaagggtttttccgctgatgccaagatgatgtatgaagaagcttcacaagttgctaacgatgccgttggttctataagaactgttgcatctttttgcgctgaagaaaaggttatgcagctgtacaagaaaaagtgtgaaggtcctatgaagaccggtatcagacaaggtttaatttccggtattggtttcggtatctccttcttcttgttattcaacgtttacgccacttctttttacgctggtgctagattggttgatgctggtaaaactactttctccgatgtgttcagagttttctttgccttgactatggctgctttgggtatttctcaatcttcttcattggctccagattcctctaaggctaaatcttctaccgcttccattttcggtattctggacagaaagtccaagatcgatagttctgatgaatccggtatgactgttgaaaacgttaagggtgaaatcgagttgagacacatctcttttaagtatccaaccagaccagacatccaaatcttcagagatttgtccttggctattcactctggtaagactgttgctttagttggtgaaagtggtagcggtaagtcaactgttattagcttgttgcagagattttacgacccagattcaggtcatattaccttggatggtatcgagatccaaaagttccaactaagatggttgagattgcagatgggtttagttagtcaagagcctgtcttgttcaacgaaactattagagctaacattgcctatggcaaagaaggtgacgctacagaaactgaaattttggctgctgctgaattggctaatgctcataagtttatttccggcttgcaacaaggttacgatactgttgtaggtgaaagaggtattcaactatcaggtggacaaaaacagagagttgcaatcgcaagagcaatggttaaggctccaaagattttgttattggatgaagccacatctgcattggacgctgaatcagaaagagttgttcaagacgctttggataaggttatggtcaatagaactacagtttgggttgctcacagattgtctactattaagaacgctgatgttatcgccgttgttaagaatggtgttattgctgaaaagggtaagcacaacgatttgatcaatgttaaggacggtgtttacgcttctttagttgcattgcatacctccgcctcctaa

SEQ ID NO: 165 - protein, 347 aa, Saccharomyces cerevisiae
MTTDTTVFVSGATGFIALHIMNDLLKAGYTVIGSGRSQEKNDGLLKKFNNNPKLSMEIVEDIAAPNAFDEVFKKHGKEIKIVLHTASPFHFETTNFEKDLLTPAVNGTKSILEAIKKYAADTVEKVIVTSSTAALVTPTDMNKGDLVITEESWNKDTWDSCQANAVAAYCGSKKFAEKTAWEFLKENKSSVKFTLSTINPGFVFGPQMFADSLKHGINTSSGIVSELIHSKVGGEFYNYCGPFIDVRDVSKAHLVAIEKPECTGQRLVLSEGLFCCQEIVDILNEEFPQLKGKIATGEPATGPSFLEKNSCKFDNSKTKKLLGFQFYNLKDCIVDTAAQMLEVQNEA

SEQ ID NO: 166 - DNA, 1044 bp, Saccharomyces cerevisiae
atgactactgataccactgttttcgtttctggcgcaaccggtttcattgctctacacattatgaacgatctgttgaaagctggctatacagtcatcggctcaggtagatctcaagaaaaaaatgatggcttgctcaaaaaatttaataacaatcccaaactatcgatggaaattgtggaagatattgctgctccaaacgcctttgatgaagttttcaaaaaacatggtaaggaaattaagattgtgctacacactgcctccccattccattttgaaactaccaattttgaaaaggatttactaacccctgcagtgaacggtacaaaatctatcttggaagcgattaaaaaatatgctgcagacactgttgaaaaagttattgttacttcgtctactgctgctctggtgacacctacagacatgaacaaaggagatttggtgatcacggaggagagttggaataaggatacatgggacagttgtcaagccaacgccgttgccgcatattgtggctcgaaaaagtttgctgaaaaaactgcttgggaatttcttaaagaaaacaagtctagtgtcaaattcacactatccactatcaatccgggattcgtttttggtcctcaaatgtttgcagattcgctaaaacatggcataaatacctcctcagggatcgtatctgagttaattcattccaaggtaggtggagaattttataattactgtggcccatttattgacgtgcgtgacgtttctaaagcccacctagttgcaattgaaaaaccagaatgtaccggccaaagattagtattgagtgaaggtttattctgctgtcaagaaatcgttgacatcttgaacgaggaattccctcaattaaagggcaagatagctacaggtgaacctgcgaccggtccaagctttttagaaaaaaactcttgcaagtttgacaattctaagacaaaaaaactactgggattccagttttacaatttaaaggattgcatagttgacaccgcggcgcaaatgttagaagttcaaaatgaagcctaa

SEQ ID NO: 167 - protein, 342 aa, Saccharomyces cerevisiae
MSVFVSGANGFIAQHIVDLLLKEDYKVIGSARSQEKAENLTEAFGNNPKFSMEVVPDISKLDAFDHVFQKHGKDIKIVLHTASPFCFDITDSERDLLIPAVNGVKGILHSIKKYAADSVERVVLTSSYAAVFDMAKENDKSLTFNEESWNPATWESCQSDPVNAYCGSKKFAEKAAWEFLEENRDSVKFELTAVNPVYVFGPQMFDKDVKKHLNTSCELVNSLMHLSPEDKIPELFGGYIDVRDVAKAHLVAFQKRETIGQRLIVSEARFTMQDVLDILNEDFPVLKGNIPVGKPGSGATHNTLGATLDNKKSKKLLGFKFRNLKETIDDTASQILKFEGRI

SEQ ID NO: 168 - DNA, 1029 bp, Saccharomyces cerevisiae
atgtcagttttcgtttcaggtgctaacgggttcattgcccaacacattgtcgatctcctgttgaaggaagactataaggtcatcggttctgccagaagtcaagaaaaggccgagaatttaacggaggcctttggtaacaacccaaaattctccatggaagttgtcccagacatatctaagctggacgcatttgaccatgttttccaaaagcacggcaaggatatcaagatagttctacatacggcctctccattctgctttgatatcactgacagtgaacgcgatttattaattcctgctgtgaacggtgttaagggaattctccactcaattaaaaaatacgccgctgattctgtagaacgtgtagttctcacctcttcttatgcagctgtgttcgatatggcaaaagaaaacgataagtctttaacatttaacgaagaatcctggaacccagctacctgggagagttgccaaagtgacccagttaacgcctactgtggttctaagaagtttgctgaaaaagcagcttgggaatttctagaggagaatagagactctgtaaaattcgaattaactgccgttaacccagtttacgtttttggtccgcaaatgtttgacaaagatgtgaaaaaacacttgaacacatcttgcgaactcgtcaacagcttgatgcatttatcaccagaggacaagataccggaactatttggtggatacattgatgttcgtgatgttgcaaaggctcatttagttgccttccaaaagagggaaacaattggtcaaagactaatcgtatcggaggccagatttactatgcaggatgttctcgatatccttaacgaagacttccctgttctaaaaggcaatattccagtggggaaaccaggttctggtgctacccataacacccttggtgctactcttgataataaaaagagtaagaaattgttaggtttcaagttcaggaacttgaaagagaccattgacgacactgcctcccaaattttaaaatttgagggcagaatataa

SEQ ID NO: 169 - DNA, 1407 bp, artificial
  Artificial
atggaacagaccccacatattgccattatgccaactcaaggtatgggtcatttgatcccattggttgaatttgccaagagattggttttgacccataatttctctgccaccttcttgattccaactgatccaggtagattgccagctgctcaaaaatctttcttggattctttgccagccggtatcaattatgttttgttgccaccagttaacttcgatgatttgccagatgatgttggttccgaaaccagaatttctttggctgttgttagatccttgccatctttgagagatgctttgaagtctttggtttccggttttagagttgttgccttggttgttgatttgttcggtactgatgcttttgatgttgctgctgaattcaacgtttccccttacattttctatccatctactgctatggccctgtctttgtttttacatttgccaaagttggacgagtctgtttcttgtgagtatagagatttgcctgaaccagttcaaattccaggttgtattccagttcatggtaaggatttgttggatccagttcaagatagaaagaacggtgcttacaaatggttgttgcatcaagtcaagagatacagattggccgaaggtattatggtcaactccttcaaagaattggaaggtggtgctattaaggccttgcaagaagaagaaccaggtaaaccaccagtttatccaattggtccattggttcaaatggatggtgctgacgaaaaatctgaatgtttgagatggttggatgatcagccaagaggttctgttttgtttgtttcttttggttccggtggcactttgtcttacgatcaattgaatgaattggccttgggtctagaaatgtccgaacaaagattcttgtgggttgttagaagtcccaacaacaaatctgctaacgctacttacttctccgtcaactctcaaaatgatccatttgctttcttgccaaagggtttcttggaaaggacaaaaggttatggtttggttgttccatcttgggctccacaagttagagttttgtctcatggttctacaggtggtttcttgactcattgtggttggaattctaccttggaatctgttgttaatggtgttccattgattgcttggccattttacgctgaacaaaagatgaatgctgtcatgttgaccgaagatttgaaggttgctttgagattgagaatcggtgaaaacggtattattggtagagctgaaattgccaaggttgtcaaaggtttgatggaaggtgaagaaggtaagcaaatcagatccagaatgatcgatttgaaagatgctgctgctagagctttgggtgaagatggtgattctacaaaatcattggctgaattggctcagaagtggaagaacaagatcatctcttga

SEQ ID NO: 170 - protein, 468 aa, artificial
  Artificial
MEQTPHIAIMPTQGMGHLIPLVEFAKRLVLTHNFSATFLIPTDPGRLPAAQKSFLDSLPAGINYVLLPPVNFDDLPDDVGSETRISLAVVRSLPSLRDALKSLVSGFRVVALVVDLFGTDAFDVAAEFNVSPYIFYPSTAMALSLFLHLPKLDESVSCEYRDLPEPVQIPGCIPVHGKDLLDPVQDRKNGAYKWLLHQVKRYRLAEGIMVNSFKELEGGAIKALQEEEPGKPPVYPIGPLVQMDGADEKSECLRWLDDQPRGSVLFVSFGSGGTLSYDQLNELALGLEMSEQRFLWVVRSPNNKSANATYFSVNSQNDPFAFLPKGFLERTKGYGLVVPSWAPQVRVLSHGSTGGFLTHCGWNSTLESVVNGVPLIAWPFYAEQKMNAVMLTEDLKVALRLRIGENGIIGRAEIAKVVKGLMEGEEGKQIRSRMIDLKDAAARALGEDGDSTKSLAELAQKWKNKIIS

SEQ ID NO: 171 - DNA, 1491 bp, artificial
  Artificial
atggaagtagttactgtagcattgatagccgtcattatatcatctatattgtatttgttgttcggttcttctggaaagaagaaggaacagaagccacatattgccttgttgccatctccaggtatgggtcatttgattccattggttgaattcgctaagcaattcgtcttgcatcatgatttccatattacctgcatcatcccagttttgggttctccatctaaagctatgaaggctgttttacaagctttgccaactaccatcgatcatgtttttttgccaccagtcatcttggaagaagaagaaatcaagggtttgaagttcgaagtccaaaccattttgactttgaccagatctttaccaccattgagggaagttttgaaaaccactagattctccgctttcgttgttgatccatttggtattgatgctctggatatcgccaaagagttgaacatttctccctacattttcttcccatctaacgcttttgccctgtccttgatttttcatttgccaaagttggacgaaaccgtttcttgtgagtatagagatttgccagaaccattgaaattgccaggttgcattccaattcatggtagagacttgattgaaccagttcaagatagaacctctgagctgtacaagatgtttttgagaaacgccaagagattcagattggccgaaggtattatcgttaacaccttcatggaattggaaggttctgctattaaggccttgttggatgaagaagctaagaacttgccattatacccaattggtccaatccaatctggttcctctaacttacaagttgacaagtctgtttccgattgcttgagatggttggataatcaaccacatggttccgttttgttcgtttgttttggttctggtggtactttgtcctacgatcaaactaacgaattggccttgggtttagaattgtccggtcaaaagtttttgtgggttgttagaactccaaacaacgaatctgctgatgctgcttatttgtccgatcaaatcttggacaacaaccccttggattttttgcctaagggtttcgttgaaagaactgaaggtcaaggtttggctgttccatcttgggctccacaagctcaagttttgtctcatggttctactggtggtttcttgactcattgtggttggaattctaccttggaatccattatgcaaggtattccattgattgcttggccattatatgccgaacaaaagatgaatgctcctttgttggcagaagatttgaaagttgctttgaggccaaagactaacaagtccggtttgattgatcaagaagagattgccaaggttgttaagggtttaatgattggtgaagagggcaaaaaggtctacaatagaatgaaggatattaagatggctgccgagaaagctttgtcagctgatggttcttctactaaggctttatctgaattggcttcccaatggaaaaatcacccaggtttctaa

SEQ ID NO: 172 - protein, 496 aa, artificial
  Artificial
MEVVTVALIAVIISSILYLLFGSSGKKKEQKPHIALLPSPGMGHLIPLVEFAKQFVLHHDFHITCIIPVLGSPSKAMKAVLQALPTTIDHVFLPPVILEEEEIKGLKFEVQTILTLTRSLPPLREVLKTTRFSAFVVDPFGIDALDIAKELNISPYIFFPSNAFALSLIFHLPKLDETVSCEYRDLPEPLKLPGCIPIHGRDLIEPVQDRTSELYKMFLRNAKRFRLAEGIIVNTFMELEGSAIKALLDEEAKNLPLYPIGPIQSGSSNLQVDKSVSDCLRWLDNQPHGSVLFVCFGSGGTLSYDQTNELALGLELSGQKFLWVVRTPNNESADAAYLSDQILDNNPLDFLPKGFVERTEGQGLAVPSWAPQAQVLSHGSTGGFLTHCGWNSTLESIMQGIPLIAWPLYAEQKMNAPLLAEDLKVALRPKTNKSGLIDQEEIAKVVKGLMIGEEGKKVYNRMKDIKMAAEKALSADGSSTKALSELASQWKNHPGF

SEQ ID NO: 173 - DNA, 1560 bp, artificial
  Artificial
atggaagtagttactgtagcattgatagccgtcattatatcatctatattgtatttgttgttcggttcttctggaaagaagaagggttcttctgaaactccaggtacttctgaatctgctactcctgaaggtggttctggtggttcaggttctgaacagaagccacatattgccttgttgccatctccaggtatgggtcatttgattccattggttgaattcgctaagcaattcgtcttgcatcatgatttccatattacctgcatcatcccagttttgggttctccatctaaagctatgaaggctgttttacaagctttgccaactaccatcgatcatgtttttttgccaccagtcatcttggaagaagaagaaatcaagggtttgaagttcgaagtccaaaccattttgactttgaccagatctttaccaccattgagggaagttttgaaaaccactagattctccgctttcgttgttgatccatttggtattgatgctctggatatcgccaaagagttgaacatttctccctacattttcttcccatctaacgcttttgccctgtccttgatttttcatttgccaaagttggacgaaaccgtttcttgtgagtatagagatttgccagaaccattgaaattgccaggttgcattccaattcatggtagagacttgattgaaccagttcaagatagaacctctgagctgtacaagatgtttttgagaaacgccaagagattcagattggccgaaggtattatcgttaacaccttcatggaattggaaggttctgctattaaggccttgttggatgaagaagctaagaacttgccattatacccaattggtccaatccaatctggttcctctaacttacaagttgacaagtctgtttccgattgcttgagatggttggataatcaaccacatggttccgttttgttcgtttgttttggttctggtggtactttgtcctacgatcaaactaacgaattggccttgggtttagaattgtccggtcaaaagtttttgtgggttgttagaactccaaacaacgaatctgctgatgctgcttatttgtccgatcaaatcttggacaacaaccccttggattttttgcctaagggtttcgttgaaagaactgaaggtcaaggtttggctgttccatcttgggctccacaagctcaagttttgtctcatggttctactggtggtttcttgactcattgtggttggaattctaccttggaatccattatgcaaggtattccattgattgcttggccattatatgccgaacaaaagatgaatgctcctttgttggcagaagatttgaaagttgctttgaggccaaagactaacaagtccggtttgattgatcaagaagagattgccaaggttgttaagggtttaatgattggtgaagagggcaaaaaggtctacaatagaatgaaggatattaagatggctgccgagaaagctttgtcagctgatggttcttctactaaggctttatctgaattggcttcccaatggaaaaatcacccaggtttctaa

SEQ ID NO: 174 - protein, 519 aa, artificial
  Artificial
MEVVTVALIAVIISSILYLLFGSSGKKKGSSETPGTSESATPEGGSGGSGSEQKPHIALLPSPGMGHLIPLVEFAKQFVLHHDFHITCIIPVLGSPSKAMKAVLQALPTTIDHVFLPPVILEEEEIKGLKFEVQTILTLTRSLPPLREVLKTTRFSAFVVDPFGIDALDIAKELNISPYIFFPSNAFALSLIFHLPKLDETVSCEYRDLPEPLKLPGCIPIHGRDLIEPVQDRTSELYKMFLRNAKRFRLAEGIIVNTFMELEGSAIKALLDEEAKNLPLYPIGPIQSGSSNLQVDKSVSDCLRWLDNQPHGSVLFVCFGSGGTLSYDQTNELALGLELSGQKFLWVVRTPNNESADAAYLSDQILDNNPLDFLPKGFVERTEGQGLAVPSWAPQAQVLSHGSTGGFLTHCGWNSTLESIMQGIPLIAWPLYAEQKMNAPLLAEDLKVALRPKTNKSGLIDQEEIAKVVKGLMIGEEGKKVYNRMKDIKMAAEKALSADGSSTKALSELASQWKNHPGF

SEQ ID NO: 175 - DNA, 1506 bp, artificial
  Artificial
atggaagtagttactgtagcattgatagccgtcattatatcatctatattgtatttgttgttcggttcttctggaaagaagaagggtggtggtggttctgaacagaagccacatattgccttgttgccatctccaggtatgggtcatttgattccattggttgaattcgctaagcaattcgtcttgcatcatgatttccatattacctgcatcatcccagttttgggttctccatctaaagctatgaaggctgttttacaagctttgccaactaccatcgatcatgtttttttgccaccagtcatcttggaagaagaagaaatcaagggtttgaagttcgaagtccaaaccattttgactttgaccagatctttaccaccattgagggaagttttgaaaaccactagattctccgctttcgttgttgatccatttggtattgatgctctggatatcgccaaagagttgaacatttctccctacattttcttcccatctaacgcttttgccctgtccttgatttttcatttgccaaagttggacgaaaccgtttcttgtgagtatagagatttgccagaaccattgaaattgccaggttgcattccaattcatggtagagacttgattgaaccagttcaagatagaacctctgagctgtacaagatgtttttgagaaacgccaagagattcagattggccgaaggtattatcgttaacaccttcatggaattggaaggttctgctattaaggccttgttggatgaagaagctaagaacttgccattatacccaattggtccaatccaatctggttcctctaacttacaagttgacaagtctgtttccgattgcttgagatggttggataatcaaccacatggttccgttttgttcgtttgttttggttctggtggtactttgtcctacgatcaaactaacgaattggccttgggtttagaattgtccggtcaaaagtttttgtgggttgttagaactccaaacaacgaatctgctgatgctgcttatttgtccgatcaaatcttggacaacaaccccttggattttttgcctaagggtttcgttgaaagaactgaaggtcaaggtttggctgttccatcttgggctccacaagctcaagttttgtctcatggttctactggtggtttcttgactcattgtggttggaattctaccttggaatccattatgcaaggtattccattgattgcttggccattatatgccgaacaaaagatgaatgctcctttgttggcagaagatttgaaagttgctttgaggccaaagactaacaagtccggtttgattgatcaagaagagattgccaaggttgttaagggtttaatgattggtgaagagggcaaaaaggtctacaatagaatgaaggatattaagatggctgccgagaaagctttgtcagctgatggttcttctactaaggctttatctgaattggcttcccaatggaaaaatcacccaggtttctaa

SEQ ID NO: 176 - protein, 501 aa, artificial
  Artificial
MEVVTVALIAVIISSILYLLFGSSGKKKGGGGSEQKPHIALLPSPGMGHLIPLVEFAKQFVLHHDFHITCIIPVLGSPSKAMKAVLQALPTTIDHVFLPPVILEEEEIKGLKFEVQTILTLTRSLPPLREVLKTTRFSAFVVDPFGIDALDIAKELNISPYIFFPSNAFALSLIFHLPKLDETVSCEYRDLPEPLKLPGCIPIHGRDLIEPVQDRTSELYKMFLRNAKRFRLAEGIIVNTFMELEGSAIKALLDEEAKNLPLYPIGPIQSGSSNLQVDKSVSDCLRWLDNQPHGSVLFVCFGSGGTLSYDQTNELALGLELSGQKFLWVVRTPNNESADAAYLSDQILDNNPLDFLPKGFVERTEGQGLAVPSWAPQAQVLSHGSTGGFLTHCGWNSTLESIMQGIPLIAWPLYAEQKMNAPLLAEDLKVALRPKTNKSGLIDQEEIAKVVKGLMIGEEGKKVYNRMKDIKMAAEKALSADGSSTKALSELASQWKNHPGF

SEQ ID NO: 177 - DNA, 1521 bp, artificial
  Artificial
atggaagtagttactgtagcattgatagccgtcattatatcatctatattgtatttgttgttcggttcttctggaaagaagaagggtggtggtggttctggtggtggcggtagtgaacagaagccacatattgccttgttgccatctccaggtatgggtcatttgattccattggttgaattcgctaagcaattcgtcttgcatcatgatttccatattacctgcatcatcccagttttgggttctccatctaaagctatgaaggctgttttacaagctttgccaactaccatcgatcatgtttttttgccaccagtcatcttggaagaagaagaaatcaagggtttgaagttcgaagtccaaaccattttgactttgaccagatctttaccaccattgagggaagttttgaaaaccactagattctccgctttcgttgttgatccatttggtattgatgctctggatatcgccaaagagttgaacatttctccctacattttcttcccatctaacgcttttgccctgtccttgatttttcatttgccaaagttggacgaaaccgtttcttgtgagtatagagatttgccagaaccattgaaattgccaggttgcattccaattcatggtagagacttgattgaaccagttcaagatagaacctctgagctgtacaagatgtttttgagaaacgccaagagattcagattggccgaaggtattatcgttaacaccttcatggaattggaaggttctgctattaaggccttgttggatgaagaagctaagaacttgccattatacccaattggtccaatccaatctggttcctctaacttacaagttgacaagtctgtttccgattgcttgagatggttggataatcaaccacatggttccgttttgttcgtttgttttggttctggtggtactttgtcctacgatcaaactaacgaattggccttgggtttagaattgtccggtcaaaagtttttgtgggttgttagaactccaaacaacgaatctgctgatgctgcttatttgtccgatcaaatcttggacaacaaccccttggattttttgcctaagggtttcgttgaaagaactgaaggtcaaggtttggctgttccatcttgggctccacaagctcaagttttgtctcatggttctactggtggtttcttgactcattgtggttggaattctaccttggaatccattatgcaaggtattccattgattgcttggccattatatgccgaacaaaagatgaatgctcctttgttggcagaagatttgaaagttgctttgaggccaaagactaacaagtccggtttgattgatcaagaagagattgccaaggttgttaagggtttaatgattggtgaagagggcaaaaaggtctacaatagaatgaaggatattaagatggctgccgagaaagctttgtcagctgatggttcttctactaaggctttatctgaattggcttcccaatggaaaaatcacccaggtttctaa

SEQ ID NO: 178 - protein, 506 aa, artificial
  Artificial
MEVVTVALIAVIISSILYLLFGSSGKKKGGGGSGGGGSEQKPHIALLPSPGMGHLIPLVEFAKQFVLHHDFHITCIIPVLGSPSKAMKAVLQALPTTIDHVFLPPVILEEEEIKGLKFEVQTILTLTRSLPPLREVLKTTRFSAFVVDPFGIDALDIAKELNISPYIFFPSNAFALSLIFHLPKLDETVSCEYRDLPEPLKLPGCIPIHGRDLIEPVQDRTSELYKMFLRNAKRFRLAEGIIVNTFMELEGSAIKALLDEEAKNLPLYPIGPIQSGSSNLQVDKSVSDCLRWLDNQPHGSVLFVCFGSGGTLSYDQTNELALGLELSGQKFLWVVRTPNNESADAAYLSDQILDNNPLDFLPKGFVERTEGQGLAVPSWAPQAQVLSHGSTGGFLTHCGWNSTLESIMQGIPLIAWPLYAEQKMNAPLLAEDLKVALRPKTNKSGLIDQEEIAKVVKGLMIGEEGKKVYNRMKDIKMAAEKALSADGSSTKALSELASQWKNHPGF

SEQ ID NO: 179 - DNA, 1536 bp, artificial
  Artificial
atggaagtagttactgtagcattgatagccgtcattatatcatctatattgtatttgttgttcggttcttctggaaagaagaagggtggtggtggttctggtggtggcggtagcggaggtggtggtagtgaacagaagccacatattgccttgttgccatctccaggtatgggtcatttgattccattggttgaattcgctaagcaattcgtcttgcatcatgatttccatattacctgcatcatcccagttttgggttctccatctaaagctatgaaggctgttttacaagctttgccaactaccatcgatcatgtttttttgccaccagtcatcttggaagaagaagaaatcaagggtttgaagttcgaagtccaaaccattttgactttgaccagatctttaccaccattgagggaagttttgaaaaccactagattctccgctttcgttgttgatccatttggtattgatgctctggatatcgccaaagagttgaacatttctccctacattttcttcccatctaacgcttttgccctgtccttgatttttcatttgccaaagttggacgaaaccgtttcttgtgagtatagagatttgccagaaccattgaaattgccaggttgcattccaattcatggtagagacttgattgaaccagttcaagatagaacctctgagctgtacaagatgtttttgagaaacgccaagagattcagattggccgaaggtattatcgttaacaccttcatggaattggaaggttctgctattaaggccttgttggatgaagaagctaagaacttgccattatacccaattggtccaatccaatctggttcctctaacttacaagttgacaagtctgtttccgattgcttgagatggttggataatcaaccacatggttccgttttgttcgtttgttttggttctggtggtactttgtcctacgatcaaactaacgaattggccttgggtttagaattgtccggtcaaaagtttttgtgggttgttagaactccaaacaacgaatctgctgatgctgcttatttgtccgatcaaatcttggacaacaaccccttggattttttgcctaagggtttcgttgaaagaactgaaggtcaaggtttggctgttccatcttgggctccacaagctcaagttttgtctcatggttctactggtggtttcttgactcattgtggttggaattctaccttggaatccattatgcaaggtattccattgattgcttggccattatatgccgaacaaaagatgaatgctcctttgttggcagaagatttgaaagttgctttgaggccaaagactaacaagtccggtttgattgatcaagaagagattgccaaggttgttaagggtttaatgattggtgaagagggcaaaaaggtctacaatagaatgaaggatattaagatggctgccgagaaagctttgtcagctgatggttcttctactaaggctttatctgaattggcttcccaatggaaaaatcacccaggtttctaa

SEQ ID NO: 180 - protein, 511 aa, artificial
  Artificial
MEVVTVALIAVIISSILYLLFGSSGKKKGGGGSGGGGSGGGGSEQKPHIALLPSPGMGHLIPLVEFAKQFVLHHDFHITCIIPVLGSPSKAMKAVLQALPTTIDHVFLPPVILEEEEIKGLKFEVQTILTLTRSLPPLREVLKTTRFSAFVVDPFGIDALDIAKELNISPYIFFPSNAFALSLIFHLPKLDETVSCEYRDLPEPLKLPGCIPIHGRDLIEPVQDRTSELYKMFLRNAKRFRLAEGIIVNTFMELEGSAIKALLDEEAKNLPLYPIGPIQSGSSNLQVDKSVSDCLRWLDNQPHGSVLFVCFGSGGTLSYDQTNELALGLELSGQKFLWVVRTPNNESADAAYLSDQILDNNPLDFLPKGFVERTEGQGLAVPSWAPQAQVLSHGSTGGFLTHCGWNSTLESIMQGIPLIAWPLYAEQKMNAPLLAEDLKVALRPKTNKSGLIDQEEIAKVVKGLMIGEEGKKVYNRMKDIKMAAEKALSADGSSTKALSELASQWKNHPGF

SEQ ID NO: 181 - DNA, 1512 bp, artificial
  Artificial
atggaagtagttactgtagcattgatagccgtcattatatcatctatattgtatttgttgttcggttcttctggaaagaagaaggctgaagctgctgctaaagctgaacagaagccacatattgccttgttgccatctccaggtatgggtcatttgattccattggttgaattcgctaagcaattcgtcttgcatcatgatttccatattacctgcatcatcccagttttgggttctccatctaaagctatgaaggctgttttacaagctttgccaactaccatcgatcatgtttttttgccaccagtcatcttggaagaagaagaaatcaagggtttgaagttcgaagtccaaaccattttgactttgaccagatctttaccaccattgagggaagttttgaaaaccactagattctccgctttcgttgttgatccatttggtattgatgctctggatatcgccaaagagttgaacatttctccctacattttcttcccatctaacgcttttgccctgtccttgatttttcatttgccaaagttggacgaaaccgtttcttgtgagtatagagatttgccagaaccattgaaattgccaggttgcattccaattcatggtagagacttgattgaaccagttcaagatagaacctctgagctgtacaagatgtttttgagaaacgccaagagattcagattggccgaaggtattatcgttaacaccttcatggaattggaaggttctgctattaaggccttgttggatgaagaagctaagaacttgccattatacccaattggtccaatccaatctggttcctctaacttacaagttgacaagtctgtttccgattgcttgagatggttggataatcaaccacatggttccgttttgttcgtttgttttggttctggtggtactttgtcctacgatcaaactaacgaattggccttgggtttagaattgtccggtcaaaagtttttgtgggttgttagaactccaaacaacgaatctgctgatgctgcttatttgtccgatcaaatcttggacaacaaccccttggattttttgcctaagggtttcgttgaaagaactgaaggtcaaggtttggctgttccatcttgggctccacaagctcaagttttgtctcatggttctactggtggtttcttgactcattgtggttggaattctaccttggaatccattatgcaaggtattccattgattgcttggccattatatgccgaacaaaagatgaatgctcctttgttggcagaagatttgaaagttgctttgaggccaaagactaacaagtccggtttgattgatcaagaagagattgccaaggttgttaagggtttaatgattggtgaagagggcaaaaaggtctacaatagaatgaaggatattaagatggctgccgagaaagctttgtcagctgatggttcttctactaaggctttatctgaattggcttcccaatggaaaaatcacccaggtttctaa

SEQ ID NO: 182 - protein, 503 aa, artificial
  Artificial
MEVVTVALIAVIISSILYLLFGSSGKKKAEAAAKAEQKPHIALLPSPGMGHLIPLVEFAKQFVLHHDFHITCIIPVLGSPSKAMKAVLQALPTTIDHVFLPPVILEEEEIKGLKFEVQTILTLTRSLPPLREVLKTTRFSAFVVDPFGIDALDIAKELNISPYIFFPSNAFALSLIFHLPKLDETVSCEYRDLPEPLKLPGCIPIHGRDLIEPVQDRTSELYKMFLRNAKRFRLAEGIIVNTFMELEGSAIKALLDEEAKNLPLYPIGPIQSGSSNLQVDKSVSDCLRWLDNQPHGSVLFVCFGSGGTLSYDQTNELALGLELSGQKFLWVVRTPNNESADAAYLSDQILDNNPLDFLPKGFVERTEGQGLAVPSWAPQAQVLSHGSTGGFLTHCGWNSTLESIMQGIPLIAWPLYAEQKMNAPLLAEDLKVALRPKTNKSGLIDQEEIAKVVKGLMIGEEGKKVYNRMKDIKMAAEKALSADGSSTKALSELASQWKNHPGF

SEQ ID NO: 183 - DNA, 1527 bp, artificial
  Artificial
atggaagtagttactgtagcattgatagccgtcattatatcatctatattgtatttgttgttcggttcttctggaaagaagaaggctgaagctgctgctaaagaagctgcagcaaaagctgaacagaagccacatattgccttgttgccatctccaggtatgggtcatttgattccattggttgaattcgctaagcaattcgtcttgcatcatgatttccatattacctgcatcatcccagttttgggttctccatctaaagctatgaaggctgttttacaagctttgccaactaccatcgatcatgtttttttgccaccagtcatcttggaagaagaagaaatcaagggtttgaagttcgaagtccaaaccattttgactttgaccagatctttaccaccattgagggaagttttgaaaaccactagattctccgctttcgttgttgatccatttggtattgatgctctggatatcgccaaagagttgaacatttctccctacattttcttcccatctaacgcttttgccctgtccttgatttttcatttgccaaagttggacgaaaccgtttcttgtgagtatagagatttgccagaaccattgaaattgccaggttgcattccaattcatggtagagacttgattgaaccagttcaagatagaacctctgagctgtacaagatgtttttgagaaacgccaagagattcagattggccgaaggtattatcgttaacaccttcatggaattggaaggttctgctattaaggccttgttggatgaagaagctaagaacttgccattatacccaattggtccaatccaatctggttcctctaacttacaagttgacaagtctgtttccgattgcttgagatggttggataatcaaccacatggttccgttttgttcgtttgttttggttctggtggtactttgtcctacgatcaaactaacgaattggccttgggtttagaattgtccggtcaaaagtttttgtgggttgttagaactccaaacaacgaatctgctgatgctgcttatttgtccgatcaaatcttggacaacaaccccttggattttttgcctaagggtttcgttgaaagaactgaaggtcaaggtttggctgttccatcttgggctccacaagctcaagttttgtctcatggttctactggtggtttcttgactcattgtggttggaattctaccttggaatccattatgcaaggtattccattgattgcttggccattatatgccgaacaaaagatgaatgctcctttgttggcagaagatttgaaagttgctttgaggccaaagactaacaagtccggtttgattgatcaagaagagattgccaaggttgttaagggtttaatgattggtgaagagggcaaaaaggtctacaatagaatgaaggatattaagatggctgccgagaaagctttgtcagctgatggttcttctactaaggctttatctgaattggcttcccaatggaaaaatcacccaggtttctaa

SEQ ID NO: 184 - protein, 508 aa, artificial
  Artificial
MEVVTVALIAVIISSILYLLFGSSGKKKAEAAAKEAAAKAEQKPHIALLPSPGMGHLIPLVEFAKQFVLHHDFHITCIIPVLGSPSKAMKAVLQALPTTIDHVFLPPVILEEEEIKGLKFEVQTILTLTRSLPPLREVLKTTRFSAFVVDPFGIDALDIAKELNISPYIFFPSNAFALSLIFHLPKLDETVSCEYRDLPEPLKLPGCIPIHGRDLIEPVQDRTSELYKMFLRNAKRFRLAEGIIVNTFMELEGSAIKALLDEEAKNLPLYPIGPIQSGSSNLQVDKSVSDCLRWLDNQPHGSVLFVCFGSGGTLSYDQTNELALGLELSGQKFLWVVRTPNNESADAAYLSDQILDNNPLDFLPKGFVERTEGQGLAVPSWAPQAQVLSHGSTGGFLTHCGWNSTLESIMQGIPLIAWPLYAEQKMNAPLLAEDLKVALRPKTNKSGLIDQEEIAKVVKGLMIGEEGKKVYNRMKDIKMAAEKALSADGSSTKALSELASQWKNHPGF

SEQ ID NO: 185 - DNA, 1542 bp, artificial
  Artificial
atggaagtagttactgtagcattgatagccgtcattatatcatctatattgtatttgttgttcggttcttctggaaagaagaaggctgaagctgctgctaaagaagcagcagcaaaagaagctgccgccaaagctgaacagaagccacatattgccttgttgccatctccaggtatgggtcatttgattccattggttgaattcgctaagcaattcgtcttgcatcatgatttccatattacctgcatcatcccagttttgggttctccatctaaagctatgaaggctgttttacaagctttgccaactaccatcgatcatgtttttttgccaccagtcatcttggaagaagaagaaatcaagggtttgaagttcgaagtccaaaccattttgactttgaccagatctttaccaccattgagggaagttttgaaaaccactagattctccgctttcgttgttgatccatttggtattgatgctctggatatcgccaaagagttgaacatttctccctacattttcttcccatctaacgcttttgccctgtccttgatttttcatttgccaaagttggacgaaaccgtttcttgtgagtatagagatttgccagaaccattgaaattgccaggttgcattccaattcatggtagagacttgattgaaccagttcaagatagaacctctgagctgtacaagatgtttttgagaaacgccaagagattcagattggccgaaggtattatcgttaacaccttcatggaattggaaggttctgctattaaggccttgttggatgaagaagctaagaacttgccattatacccaattggtccaatccaatctggttcctctaacttacaagttgacaagtctgtttccgattgcttgagatggttggataatcaaccacatggttccgttttgttcgtttgttttggttctggtggtactttgtcctacgatcaaactaacgaattggccttgggtttagaattgtccggtcaaaagtttttgtgggttgttagaactccaaacaacgaatctgctgatgctgcttatttgtccgatcaaatcttggacaacaaccccttggattttttgcctaagggtttcgttgaaagaactgaaggtcaaggtttggctgttccatcttgggctccacaagctcaagttttgtctcatggttctactggtggtttcttgactcattgtggttggaattctaccttggaatccattatgcaaggtattccattgattgcttggccattatatgccgaacaaaagatgaatgctcctttgttggcagaagatttgaaagttgctttgaggccaaagactaacaagtccggtttgattgatcaagaagagattgccaaggttgttaagggtttaatgattggtgaagagggcaaaaaggtctacaatagaatgaaggatattaagatggctgccgagaaagctttgtcagctgatggttcttctactaaggctttatctgaattggcttcccaatggaaaaatcacccaggtttctaa

SEQ ID NO: 186 - protein, 513 aa, artificial
  Artificial
MEVVTVALIAVIISSILYLLFGSSGKKKAEAAAKEAAAKEAAAKAEQKPHIALLPSPGMGHLIPLVEFAKQFVLHHDFHITCIIPVLGSPSKAMKAVLQALPTTIDHVFLPPVILEEEEIKGLKFEVQTILTLTRSLPPLREVLKTTRFSAFVVDPFGIDALDIAKELNISPYIFFPSNAFALSLIFHLPKLDETVSCEYRDLPEPLKLPGCIPIHGRDLIEPVQDRTSELYKMFLRNAKRFRLAEGIIVNTFMELEGSAIKALLDEEAKNLPLYPIGPIQSGSSNLQVDKSVSDCLRWLDNQPHGSVLFVCFGSGGTLSYDQTNELALGLELSGQKFLWVVRTPNNESADAAYLSDQILDNNPLDFLPKGFVERTEGQGLAVPSWAPQAQVLSHGSTGGFLTHCGWNSTLESIMQGIPLIAWPLYAEQKMNAPLLAEDLKVALRPKTNKSGLIDQEEIAKVVKGLMIGEEGKKVYNRMKDIKMAAEKALSADGSSTKALSELASQWKNHPGF

SEQ ID NO: 187 - DNA, 1545 bp, artificial
  Artificial
atggaagtagttactgtagcattgatagccgtcattatatcatctatattgtatttgttgttcggttcttctggaaagaagaagaaagagtccggttctgtttcctctgaacaattggctcaattcagatccttggacgaacagaagccacatattgccttgttgccatctccaggtatgggtcatttgattccattggttgaattcgctaagcaattcgtcttgcatcatgatttccatattacctgcatcatcccagttttgggttctccatctaaagctatgaaggctgttttacaagctttgccaactaccatcgatcatgtttttttgccaccagtcatcttggaagaagaagaaatcaagggtttgaagttcgaagtccaaaccattttgactttgaccagatctttaccaccattgagggaagttttgaaaaccactagattctccgctttcgttgttgatccatttggtattgatgctctggatatcgccaaagagttgaacatttctccctacattttcttcccatctaacgcttttgccctgtccttgatttttcatttgccaaagttggacgaaaccgtttcttgtgagtatagagatttgccagaaccattgaaattgccaggttgcattccaattcatggtagagacttgattgaaccagttcaagatagaacctctgagctgtacaagatgtttttgagaaacgccaagagattcagattggccgaaggtattatcgttaacaccttcatggaattggaaggttctgctattaaggccttgttggatgaagaagctaagaacttgccattatacccaattggtccaatccaatctggttcctctaacttacaagttgacaagtctgtttccgattgcttgagatggttggataatcaaccacatggttccgttttgttcgtttgttttggttctggtggtactttgtcctacgatcaaactaacgaattggccttgggtttagaattgtccggtcaaaagtttttgtgggttgttagaactccaaacaacgaatctgctgatgctgcttatttgtccgatcaaatcttggacaacaaccccttggattttttgcctaagggtttcgttgaaagaactgaaggtcaaggtttggctgttccatcttgggctccacaagctcaagttttgtctcatggttctactggtggtttcttgactcattgtggttggaattctaccttggaatccattatgcaaggtattccattgattgcttggccattatatgccgaacaaaagatgaatgctcctttgttggcagaagatttgaaagttgctttgaggccaaagactaacaagtccggtttgattgatcaagaagagattgccaaggttgttaagggtttaatgattggtgaagagggcaaaaaggtctacaatagaatgaaggatattaagatggctgccgagaaagctttgtcagctgatggttcttctactaaggctttatctgaattggcttcccaatggaaaaatcacccaggtttctaa

SEQ ID NO: 188 - protein, 514 aa, artificial
  Artificial
MEVVTVALIAVIISSILYLLFGSSGKKKKESGSVSSEQLAQFRSLDEQKPHIALLPSPGMGHLIPLVEFAKQFVLHHDFHITCIIPVLGSPSKAMKAVLQALPTTIDHVFLPPVILEEEEIKGLKFEVQTILTLTRSLPPLREVLKTTRFSAFVVDPFGIDALDIAKELNISPYIFFPSNAFALSLIFHLPKLDETVSCEYRDLPEPLKLPGCIPIHGRDLIEPVQDRTSELYKMFLRNAKRFRLAEGIIVNTFMELEGSAIKALLDEEAKNLPLYPIGPIQSGSSNLQVDKSVSDCLRWLDNQPHGSVLFVCFGSGGTLSYDQTNELALGLELSGQKFLWVVRTPNNESADAAYLSDQILDNNPLDFLPKGFVERTEGQGLAVPSWAPQAQVLSHGSTGGFLTHCGWNSTLESIMQGIPLIAWPLYAEQKMNAPLLAEDLKVALRPKTNKSGLIDQEEIAKVVKGLMIGEEGKKVYNRMKDIKMAAEKALSADGSSTKALSELASQWKNHPGF

SEQ ID NO: 189 - DNA, 1533 bp, artificial
  Artificial
atggaagtagttactgtagcattgatagccgtcattatatcatctatattgtatttgttgttcggttcttctggaaagaagaaggaaggtaagagttctggttcaggttctgaatctaagtctaccgaacagaagccacatattgccttgttgccatctccaggtatgggtcatttgattccattggttgaattcgctaagcaattcgtcttgcatcatgatttccatattacctgcatcatcccagttttgggttctccatctaaagctatgaaggctgttttacaagctttgccaactaccatcgatcatgtttttttgccaccagtcatcttggaagaagaagaaatcaagggtttgaagttcgaagtccaaaccattttgactttgaccagatctttaccaccattgagggaagttttgaaaaccactagattctccgctttcgttgttgatccatttggtattgatgctctggatatcgccaaagagttgaacatttctccctacattttcttcccatctaacgcttttgccctgtccttgatttttcatttgccaaagttggacgaaaccgtttcttgtgagtatagagatttgccagaaccattgaaattgccaggttgcattccaattcatggtagagacttgattgaaccagttcaagatagaacctctgagctgtacaagatgtttttgagaaacgccaagagattcagattggccgaaggtattatcgttaacaccttcatggaattggaaggttctgctattaaggccttgttggatgaagaagctaagaacttgccattatacccaattggtccaatccaatctggttcctctaacttacaagttgacaagtctgtttccgattgcttgagatggttggataatcaaccacatggttccgttttgttcgtttgttttggttctggtggtactttgtcctacgatcaaactaacgaattggccttgggtttagaattgtccggtcaaaagtttttgtgggttgttagaactccaaacaacgaatctgctgatgctgcttatttgtccgatcaaatcttggacaacaaccccttggattttttgcctaagggtttcgttgaaagaactgaaggtcaaggtttggctgttccatcttgggctccacaagctcaagttttgtctcatggttctactggtggtttcttgactcattgtggttggaattctaccttggaatccattatgcaaggtattccattgattgcttggccattatatgccgaacaaaagatgaatgctcctttgttggcagaagatttgaaagttgctttgaggccaaagactaacaagtccggtttgattgatcaagaagagattgccaaggttgttaagggtttaatgattggtgaagagggcaaaaaggtctacaatagaatgaaggatattaagatggctgccgagaaagctttgtcagctgatggttcttctactaaggctttatctgaattggcttcccaatggaaaaatcacccaggtttctaa

SEQ ID NO: 190 - protein, 510 aa, artificial
  Artificial
MEVVTVALIAVIISSILYLLFGSSGKKKEGKSSGSGSESKSTEQKPHIALLPSPGMGHLIPLVEFAKQFVLHHDFHITCIIPVLGSPSKAMKAVLQALPTTIDHVFLPPVILEEEEIKGLKFEVQTILTLTRSLPPLREVLKTTRFSAFVVDPFGIDALDIAKELNISPYIFFPSNAFALSLIFHLPKLDETVSCEYRDLPEPLKLPGCIPIHGRDLIEPVQDRTSELYKMFLRNAKRFRLAEGIIVNTFMELEGSAIKALLDEEAKNLPLYPIGPIQSGSSNLQVDKSVSDCLRWLDNQPHGSVLFVCFGSGGTLSYDQTNELALGLELSGQKFLWVVRTPNNESADAAYLSDQILDNNPLDFLPKGFVERTEGQGLAVPSWAPQAQVLSHGSTGGFLTHCGWNSTLESIMQGIPLIAWPLYAEQKMNAPLLAEDLKVALRPKTNKSGLIDQEEIAKVVKGLMIGEEGKKVYNRMKDIKMAAEKALSADGSSTKALSELASQWKNHPGF

SEQ ID NO: 191 - DNA, 1524 bp, artificial
  Artificial
atggaagtagttactgtagcattgatagccgtcattatatcatctatattgtatttgttgttcggttcttctggaaagaagaaggctgaagctgctgctaaaggtggtggtggttctgaacagaagccacatattgccttgttgccatctccaggtatgggtcatttgattccattggttgaattcgctaagcaattcgtcttgcatcatgatttccatattacctgcatcatcccagttttgggttctccatctaaagctatgaaggctgttttacaagctttgccaactaccatcgatcatgtttttttgccaccagtcatcttggaagaagaagaaatcaagggtttgaagttcgaagtccaaaccattttgactttgaccagatctttaccaccattgagggaagttttgaaaaccactagattctccgctttcgttgttgatccatttggtattgatgctctggatatcgccaaagagttgaacatttctccctacattttcttcccatctaacgcttttgccctgtccttgatttttcatttgccaaagttggacgaaaccgtttcttgtgagtatagagatttgccagaaccattgaaattgccaggttgcattccaattcatggtagagacttgattgaaccagttcaagatagaacctctgagctgtacaagatgtttttgagaaacgccaagagattcagattggccgaaggtattatcgttaacaccttcatggaattggaaggttctgctattaaggccttgttggatgaagaagctaagaacttgccattatacccaattggtccaatccaatctggttcctctaacttacaagttgacaagtctgtttccgattgcttgagatggttggataatcaaccacatggttccgttttgttcgtttgttttggttctggtggtactttgtcctacgatcaaactaacgaattggccttgggtttagaattgtccggtcaaaagtttttgtgggttgttagaactccaaacaacgaatctgctgatgctgcttatttgtccgatcaaatcttggacaacaaccccttggattttttgcctaagggtttcgttgaaagaactgaaggtcaaggtttggctgttccatcttgggctccacaagctcaagttttgtctcatggttctactggtggtttcttgactcattgtggttggaattctaccttggaatccattatgcaaggtattccattgattgcttggccattatatgccgaacaaaagatgaatgctcctttgttggcagaagatttgaaagttgctttgaggccaaagactaacaagtccggtttgattgatcaagaagagattgccaaggttgttaagggtttaatgattggtgaagagggcaaaaaggtctacaatagaatgaaggatattaagatggctgccgagaaagctttgtcagctgatggttcttctactaaggctttatctgaattggcttcccaatggaaaaatcacccaggtttctaa

SEQ ID NO: 192 - protein, 507 aa, artificial
  Artificial
MEVVTVALIAVIISSILYLLFGSSGKKKAEAAAKGGGGSEQKPHIALLPSPGMGHLIPLVEFAKQFVLHHDFHITCIIPVLGSPSKAMKAVLQALPTTIDHVFLPPVILEEEEIKGLKFEVQTILTLTRSLPPLREVLKTTRFSAFVVDPFGIDALDIAKELNISPYIFFPSNAFALSLIFHLPKLDETVSCEYRDLPEPLKLPGCIPIHGRDLIEPVQDRTSELYKMFLRNAKRFRLAEGIIVNTFMELEGSAIKALLDEEAKNLPLYPIGPIQSGSSNLQVDKSVSDCLRWLDNQPHGSVLFVCFGSGGTLSYDQTNELALGLELSGQKFLWVVRTPNNESADAAYLSDQILDNNPLDFLPKGFVERTEGQGLAVPSWAPQAQVLSHGSTGGFLTHCGWNSTLESIMQGIPLIAWPLYAEQKMNAPLLAEDLKVALRPKTNKSGLIDQEEIAKVVKGLMIGEEGKKVYNRMKDIKMAAEKALSADGSSTKALSELASQWKNHPGF

SEQ ID NO: 193 - DNA, 1557 bp, artificial
  Artificial
atggaagtagttactgtagcattgatagccgtcattatatcatctatattgtatttgttgttcggttcttctggaaagaagaagggtggtggtggttctggtggtggcggtagtgctgaagctgctgctaaagaagctgcagcaaaagctgaacagaagccacatattgccttgttgccatctccaggtatgggtcatttgattccattggttgaattcgctaagcaattcgtcttgcatcatgatttccatattacctgcatcatcccagttttgggttctccatctaaagctatgaaggctgttttacaagctttgccaactaccatcgatcatgtttttttgccaccagtcatcttggaagaagaagaaatcaagggtttgaagttcgaagtccaaaccattttgactttgaccagatctttaccaccattgagggaagttttgaaaaccactagattctccgctttcgttgttgatccatttggtattgatgctctggatatcgccaaagagttgaacatttctccctacattttcttcccatctaacgcttttgccctgtccttgatttttcatttgccaaagttggacgaaaccgtttcttgtgagtatagagatttgccagaaccattgaaattgccaggttgcattccaattcatggtagagacttgattgaaccagttcaagatagaacctctgagctgtacaagatgtttttgagaaacgccaagagattcagattggccgaaggtattatcgttaacaccttcatggaattggaaggttctgctattaaggccttgttggatgaagaagctaagaacttgccattatacccaattggtccaatccaatctggttcctctaacttacaagttgacaagtctgtttccgattgcttgagatggttggataatcaaccacatggttccgttttgttcgtttgttttggttctggtggtactttgtcctacgatcaaactaacgaattggccttgggtttagaattgtccggtcaaaagtttttgtgggttgttagaactccaaacaacgaatctgctgatgctgcttatttgtccgatcaaatcttggacaacaaccccttggattttttgcctaagggtttcgttgaaagaactgaaggtcaaggtttggctgttccatcttgggctccacaagctcaagttttgtctcatggttctactggtggtttcttgactcattgtggttggaattctaccttggaatccattatgcaaggtattccattgattgcttggccattatatgccgaacaaaagatgaatgctcctttgttggcagaagatttgaaagttgctttgaggccaaagactaacaagtccggtttgattgatcaagaagagattgccaaggttgttaagggtttaatgattggtgaagagggcaaaaaggtctacaatagaatgaaggatattaagatggctgccgagaaagctttgtcagctgatggttcttctactaaggctttatctgaattggcttcccaatggaaaaatcacccaggtttctaa

SEQ ID NO: 194 - protein, 518 aa, artificial
  Artificial
MEVVTVALIAVIISSILYLLFGSSGKKKGGGGSGGGGSAEAAAKEAAAKAEQKPHIALLPSPGMGHLIPLVEFAKQFVLHHDFHITCIIPVLGSPSKAMKAVLQALPTTIDHVFLPPVILEEEEIKGLKFEVQTILTLTRSLPPLREVLKTTRFSAFVVDPFGIDALDIAKELNISPYIFFPSNAFALSLIFHLPKLDETVSCEYRDLPEPLKLPGCIPIHGRDLIEPVQDRTSELYKMFLRNAKRFRLAEGIIVNTFMELEGSAIKALLDEEAKNLPLYPIGPIQSGSSNLQVDKSVSDCLRWLDNQPHGSVLFVCFGSGGTLSYDQTNELALGLELSGQKFLWVVRTPNNESADAAYLSDQILDNNPLDFLPKGFVERTEGQGLAVPSWAPQAQVLSHGSTGGFLTHCGWNSTLESIMQGIPLIAWPLYAEQKMNAPLLAEDLKVALRPKTNKSGLIDQEEIAKVVKGLMIGEEGKKVYNRMKDIKMAAEKALSADGSSTKALSELASQWKNHPGF

SEQ ID NO: 195 - DNA, 1554 bp, artificial
  Artificial
atggaagtagttactgtagcattgatagccgtcattatatcatctatattgtatttgttgttcggttcttctggaaagaagaaggctgaagctgctgctaaagaagctgcagcaaaaggcggtggtggttcaggtggtggtggtagtgaacagaagccacatattgccttgttgccatctccaggtatgggtcatttgattccattggttgaattcgctaagcaattcgtcttgcatcatgatttccatattacctgcatcatcccagttttgggttctccatctaaagctatgaaggctgttttacaagctttgccaactaccatcgatcatgtttttttgccaccagtcatcttggaagaagaagaaatcaagggtttgaagttcgaagtccaaaccattttgactttgaccagatctttaccaccattgagggaagttttgaaaaccactagattctccgctttcgttgttgatccatttggtattgatgctctggatatcgccaaagagttgaacatttctccctacattttcttcccatctaacgcttttgccctgtccttgatttttcatttgccaaagttggacgaaaccgtttcttgtgagtatagagatttgccagaaccattgaaattgccaggttgcattccaattcatggtagagacttgattgaaccagttcaagatagaacctctgagctgtacaagatgtttttgagaaacgccaagagattcagattggccgaaggtattatcgttaacaccttcatggaattggaaggttctgctattaaggccttgttggatgaagaagctaagaacttgccattatacccaattggtccaatccaatctggttcctctaacttacaagttgacaagtctgtttccgattgcttgagatggttggataatcaaccacatggttccgttttgttcgtttgttttggttctggtggtactttgtcctacgatcaaactaacgaattggccttgggtttagaattgtccggtcaaaagtttttgtgggttgttagaactccaaacaacgaatctgctgatgctgcttatttgtccgatcaaatcttggacaacaaccccttggattttttgcctaagggtttcgttgaaagaactgaaggtcaaggtttggctgttccatcttgggctccacaagctcaagttttgtctcatggttctactggtggtttcttgactcattgtggttggaattctaccttggaatccattatgcaaggtattccattgattgcttggccattatatgccgaacaaaagatgaatgctcctttgttggcagaagatttgaaagttgctttgaggccaaagactaacaagtccggtttgattgatcaagaagagattgccaaggttgttaagggtttaatgattggtgaagagggcaaaaaggtctacaatagaatgaaggatattaagatggctgccgagaaagctttgtcagctgatggttcttctactaaggctttatctgaattggcttcccaatggaaaaatcacccaggtttctaa

SEQ ID NO: 196 - protein, 517 aa, artificial
  Artificial
MEVVTVALIAVIISSILYLLFGSSGKKKAEAAAKEAAAKGGGGSGGGGSEQKPHIALLPSPGMGHLIPLVEFAKQFVLHHDFHITCIIPVLGSPSKAMKAVLQALPTTIDHVFLPPVILEEEEIKGLKFEVQTILTLTRSLPPLREVLKTTRFSAFVVDPFGIDALDIAKELNISPYIFFPSNAFALSLIFHLPKLDETVSCEYRDLPEPLKLPGCIPIHGRDLIEPVQDRTSELYKMFLRNAKRFRLAEGIIVNTFMELEGSAIKALLDEEAKNLPLYPIGPIQSGSSNLQVDKSVSDCLRWLDNQPHGSVLFVCFGSGGTLSYDQTNELALGLELSGQKFLWVVRTPNNESADAAYLSDQILDNNPLDFLPKGFVERTEGQGLAVPSWAPQAQVLSHGSTGGFLTHCGWNSTLESIMQGIPLIAWPLYAEQKMNAPLLAEDLKVALRPKTNKSGLIDQEEIAKVVKGLMIGEEGKKVYNRMKDIKMAAEKALSADGSSTKALSELASQWKNHPGF

SEQ ID NO: 197 - DNA, 1557 bp, artificial
  Artificial
atggaagtagttactgtagcattgatagccgtcattatatcatctatattgtatttgttgttcggttcttctggaaagaagaagttggaaggttctggtcaaggtccaggtagcggtcaaggtagtggttctccaggttcaggacaaggtgaacagaagccacatattgccttgttgccatctccaggtatgggtcatttgattccattggttgaattcgctaagcaattcgtcttgcatcatgatttccatattacctgcatcatcccagttttgggttctccatctaaagctatgaaggctgttttacaagctttgccaactaccatcgatcatgtttttttgccaccagtcatcttggaagaagaagaaatcaagggtttgaagttcgaagtccaaaccattttgactttgaccagatctttaccaccattgagggaagttttgaaaaccactagattctccgctttcgttgttgatccatttggtattgatgctctggatatcgccaaagagttgaacatttctccctacattttcttcccatctaacgcttttgccctgtccttgatttttcatttgccaaagttggacgaaaccgtttcttgtgagtatagagatttgccagaaccattgaaattgccaggttgcattccaattcatggtagagacttgattgaaccagttcaagatagaacctctgagctgtacaagatgtttttgagaaacgccaagagattcagattggccgaaggtattatcgttaacaccttcatggaattggaaggttctgctattaaggccttgttggatgaagaagctaagaacttgccattatacccaattggtccaatccaatctggttcctctaacttacaagttgacaagtctgtttccgattgcttgagatggttggataatcaaccacatggttccgttttgttcgtttgttttggttctggtggtactttgtcctacgatcaaactaacgaattggccttgggtttagaattgtccggtcaaaagtttttgtgggttgttagaactccaaacaacgaatctgctgatgctgcttatttgtccgatcaaatcttggacaacaaccccttggattttttgcctaagggtttcgttgaaagaactgaaggtcaaggtttggctgttccatcttgggctccacaagctcaagttttgtctcatggttctactggtggtttcttgactcattgtggttggaattctaccttggaatccattatgcaaggtattccattgattgcttggccattatatgccgaacaaaagatgaatgctcctttgttggcagaagatttgaaagttgctttgaggccaaagactaacaagtccggtttgattgatcaagaagagattgccaaggttgttaagggtttaatgattggtgaagagggcaaaaaggtctacaatagaatgaaggatattaagatggctgccgagaaagctttgtcagctgatggttcttctactaaggctttatctgaattggcttcccaatggaaaaatcacccaggtttctaa

SEQ ID NO: 198 - protein, 518 aa, artificial
  Artificial
MEVVTVALIAVIISSILYLLFGSSGKKKLEGSGQGPGSGQGSGSPGSGQGEQKPHIALLPSPGMGHLIPLVEFAKQFVLHHDFHITCIIPVLGSPSKAMKAVLQALPTTIDHVFLPPVILEEEEIKGLKFEVQTILTLTRSLPPLREVLKTTRFSAFVVDPFGIDALDIAKELNISPYIFFPSNAFALSLIFHLPKLDETVSCEYRDLPEPLKLPGCIPIHGRDLIEPVQDRTSELYKMFLRNAKRFRLAEGIIVNTFMELEGSAIKALLDEEAKNLPLYPIGPIQSGSSNLQVDKSVSDCLRWLDNQPHGSVLFVCFGSGGTLSYDQTNELALGLELSGQKFLWVVRTPNNESADAAYLSDQILDNNPLDFLPKGFVERTEGQGLAVPSWAPQAQVLSHGSTGGFLTHCGWNSTLESIMQGIPLIAWPLYAEQKMNAPLLAEDLKVALRPKTNKSGLIDQEEIAKVVKGLMIGEEGKKVYNRMKDIKMAAEKALSADGSSTKALSELASQWKNHPGF

SEQ ID NO: 199 - DNA, 1569 bp, artificial
  Artificial
atggaagtagttactgtagcattgatagccgtcattatatcatctatattgtatttgttgttcggttcttctggaaagaagaagttggaagctgaagctgctgctaaagaagcagcagcaaaagaagctgccgccaaagaggccgctgctaaggctttggaagaacagaagccacatattgccttgttgccatctccaggtatgggtcatttgattccattggttgaattcgctaagcaattcgtcttgcatcatgatttccatattacctgcatcatcccagttttgggttctccatctaaagctatgaaggctgttttacaagctttgccaactaccatcgatcatgtttttttgccaccagtcatcttggaagaagaagaaatcaagggtttgaagttcgaagtccaaaccattttgactttgaccagatctttaccaccattgagggaagttttgaaaaccactagattctccgctttcgttgttgatccatttggtattgatgctctggatatcgccaaagagttgaacatttctccctacattttcttcccatctaacgcttttgccctgtccttgatttttcatttgccaaagttggacgaaaccgtttcttgtgagtatagagatttgccagaaccattgaaattgccaggttgcattccaattcatggtagagacttgattgaaccagttcaagatagaacctctgagctgtacaagatgtttttgagaaacgccaagagattcagattggccgaaggtattatcgttaacaccttcatggaattggaaggttctgctattaaggccttgttggatgaagaagctaagaacttgccattatacccaattggtccaatccaatctggttcctctaacttacaagttgacaagtctgtttccgattgcttgagatggttggataatcaaccacatggttccgttttgttcgtttgttttggttctggtggtactttgtcctacgatcaaactaacgaattggccttgggtttagaattgtccggtcaaaagtttttgtgggttgttagaactccaaacaacgaatctgctgatgctgcttatttgtccgatcaaatcttggacaacaaccccttggattttttgcctaagggtttcgttgaaagaactgaaggtcaaggtttggctgttccatcttgggctccacaagctcaagttttgtctcatggttctactggtggtttcttgactcattgtggttggaattctaccttggaatccattatgcaaggtattccattgattgcttggccattatatgccgaacaaaagatgaatgctcctttgttggcagaagatttgaaagttgctttgaggccaaagactaacaagtccggtttgattgatcaagaagagattgccaaggttgttaagggtttaatgattggtgaagagggcaaaaaggtctacaatagaatgaaggatattaagatggctgccgagaaagctttgtcagctgatggttcttctactaaggctttatctgaattggcttcccaatggaaaaatcacccaggtttctaa

SEQ ID NO: 200 - protein, 522 aa, artificial
  Artificial
MEVVTVALIAVIISSILYLLFGSSGKKKLEAEAAAKEAAAKEAAAKEAAAKALEEQKPHIALLPSPGMGHLIPLVEFAKQFVLHHDFHITCIIPVLGSPSKAMKAVLQALPTTIDHVFLPPVILEEEEIKGLKFEVQTILTLTRSLPPLREVLKTTRFSAFVVDPFGIDALDIAKELNISPYIFFPSNAFALSLIFHLPKLDETVSCEYRDLPEPLKLPGCIPIHGRDLIEPVQDRTSELYKMFLRNAKRFRLAEGIIVNTFMELEGSAIKALLDEEAKNLPLYPIGPIQSGSSNLQVDKSVSDCLRWLDNQPHGSVLFVCFGSGGTLSYDQTNELALGLELSGQKFLWVVRTPNNESADAAYLSDQILDNNPLDFLPKGFVERTEGQGLAVPSWAPQAQVLSHGSTGGFLTHCGWNSTLESIMQGIPLIAWPLYAEQKMNAPLLAEDLKVALRPKTNKSGLIDQEEIAKVVKGLMIGEEGKKVYNRMKDIKMAAEKALSADGSSTKALSELASQWKNHPGF

SEQ ID NO: 201 - DNA, 1641 bp, artificial
  Artificial
atggaagtagttactgtagcattgatagccgtcattatatcatctatattgtatttgttgttcggttcttctggaaagaagaagttggaagctgaagctgctgctaaagaagcagcagcaaaagaagctgccgccaaagaggccgctgctaaggctttagaagcagaagccgctgcaaaagaggctgctgcaaaagaagccgccgctaaagaagcagctgccaaagctttagaagaacagaagccacatattgccttgttgccatctccaggtatgggtcatttgattccattggttgaattcgctaagcaattcgtcttgcatcatgatttccatattacctgcatcatcccagttttgggttctccatctaaagctatgaaggctgttttacaagctttgccaactaccatcgatcatgtttttttgccaccagtcatcttggaagaagaagaaatcaagggtttgaagttcgaagtccaaaccattttgactttgaccagatctttaccaccattgagggaagttttgaaaaccactagattctccgctttcgttgttgatccatttggtattgatgctctggatatcgccaaagagttgaacatttctccctacattttcttcccatctaacgcttttgccctgtccttgatttttcatttgccaaagttggacgaaaccgtttcttgtgagtatagagatttgccagaaccattgaaattgccaggttgcattccaattcatggtagagacttgattgaaccagttcaagatagaacctctgagctgtacaagatgtttttgagaaacgccaagagattcagattggccgaaggtattatcgttaacaccttcatggaattggaaggttctgctattaaggccttgttggatgaagaagctaagaacttgccattatacccaattggtccaatccaatctggttcctctaacttacaagttgacaagtctgtttccgattgcttgagatggttggataatcaaccacatggttccgttttgttcgtttgttttggttctggtggtactttgtcctacgatcaaactaacgaattggccttgggtttagaattgtccggtcaaaagtttttgtgggttgttagaactccaaacaacgaatctgctgatgctgcttatttgtccgatcaaatcttggacaacaaccccttggattttttgcctaagggtttcgttgaaagaactgaaggtcaaggtttggctgttccatcttgggctccacaagctcaagttttgtctcatggttctactggtggtttcttgactcattgtggttggaattctaccttggaatccattatgcaaggtattccattgattgcttggccattatatgccgaacaaaagatgaatgctcctttgttggcagaagatttgaaagttgctttgaggccaaagactaacaagtccggtttgattgatcaagaagagattgccaaggttgttaagggtttaatgattggtgaagagggcaaaaaggtctacaatagaatgaaggatattaagatggctgccgagaaagctttgtcagctgatggttcttctactaaggctttatctgaattggcttcccaatggaaaaatcacccaggtttctaa

SEQ ID NO: 202 - protein, 546 aa, artificial
  Artificial
MEVVTVALIAVIISSILYLLFGSSGKKKLEAEAAAKEAAAKEAAAKEAAAKALEAEAAAKEAAAKEAAAKEAAAKALEEQKPHIALLPSPGMGHLIPLVEFAKQFVLHHDFHITCIIPVLGSPSKAMKAVLQALPTTIDHVFLPPVILEEEEIKGLKFEVQTILTLTRSLPPLREVLKTTRFSAFVVDPFGIDALDIAKELNISPYIFFPSNAFALSLIFHLPKLDETVSCEYRDLPEPLKLPGCIPIHGRDLIEPVQDRTSELYKMFLRNAKRFRLAEGIIVNTFMELEGSAIKALLDEEAKNLPLYPIGPIQSGSSNLQVDKSVSDCLRWLDNQPHGSVLFVCFGSGGTLSYDQTNELALGLELSGQKFLWVVRTPNNESADAAYLSDQILDNNPLDFLPKGFVERTEGQGLAVPSWAPQAQVLSHGSTGGFLTHCGWNSTLESIMQGIPLIAWPLYAEQKMNAPLLAEDLKVALRPKTNKSGLIDQEEIAKVVKGLMIGEEGKKVYNRMKDIKMAAEKALSADGSSTKALSELASQWKNHPGF

SEQ ID NO: 203 - DNA, 1995 bp, artificial
  Artificial
atgaaggcccaatacgaagatggtaaacagtacactactttggaaaaaccagttgctggtgctccacaagttttggaatttttctctttcttctgcccacactgctaccaatttgaagaagtcttgcatatctccgacaacgtcaaaaagaaattgcctgaaggtgttaagatgaccaagtaccatgttaatttcatgggtggtgatttgggtaaagatttgactcaagcttgggctgttgctatggctttgggtgttgaagataaggttactgttcctttgttcgaaggtgttcaaaagacccaaactattagatccgcctccgatattagagatgttttcattaacgctggtatcaagggtgaagaatatgatgctgcttggaattccttcgttgttaagtctttggttgcccaacaagaaaaagctgctgctgatgttcaattgagaggtgttccagctatgttcgttaacggtaaataccaattgaacccacaaggtatggatacctctaacatggatgttttcgttcaacaatacgccgataccgttaagtacttgtctgaaaagaagggtggtggtggttctgaacagaagccacatattgccttgttgccatctccaggtatgggtcatttgattccattggttgaattcgctaagcaattcgtcttgcatcatgatttccatattacctgcatcatcccagttttgggttctccatctaaagctatgaaggctgttttacaagctttgccaactaccatcgatcatgtttttttgccaccagtcatcttggaagaagaagaaatcaagggtttgaagttcgaagtccaaaccattttgactttgaccagatctttaccaccattgagggaagttttgaaaaccactagattctccgctttcgttgttgatccatttggtattgatgctctggatatcgccaaagagttgaacatttctccctacattttcttcccatctaacgcttttgccctgtccttgatttttcatttgccaaagttggacgaaaccgtttcttgtgagtatagagatttgccagaaccattgaaattgccaggttgcattccaattcatggtagagacttgattgaaccagttcaagatagaacctctgagctgtacaagatgtttttgagaaacgccaagagattcagattggccgaaggtattatcgttaacaccttcatggaattggaaggttctgctattaaggccttgttggatgaagaagctaagaacttgccattatacccaattggtccaatccaatctggttcctctaacttacaagttgacaagtctgtttccgattgcttgagatggttggataatcaaccacatggttccgttttgttcgtttgttttggttctggtggtactttgtcctacgatcaaactaacgaattggccttgggtttagaattgtccggtcaaaagtttttgtgggttgttagaactccaaacaacgaatctgctgatgctgcttatttgtccgatcaaatcttggacaacaaccccttggattttttgcctaagggtttcgttgaaagaactgaaggtcaaggtttggctgttccatcttgggctccacaagctcaagttttgtctcatggttctactggtggtttcttgactcattgtggttggaattctaccttggaatccattatgcaaggtattccattgattgcttggccattatatgccgaacaaaagatgaatgctcctttgttggcagaagatttgaaagttgctttgaggccaaagactaacaagtccggtttgattgatcaagaagagattgccaaggttgttaagggtttaatgattggtgaagagggcaaaaaggtctacaatagaatgaaggatattaagatggctgccgagaaagctttgtcagctgatggttcttctactaaggctttatctgaattggcttcccaatggaaaaatcacccaggtttctaa

SEQ ID NO: 204 - protein, 664 aa, artificial
  Artificial
MKAQYEDGKQYTTLEKPVAGAPQVLEFFSFFCPHCYQFEEVLHISDNVKKKLPEGVKMTKYHVNFMGGDLGKDLTQAWAVAMALGVEDKVTVPLFEGVQKTQTIRSASDIRDVFINAGIKGEEYDAAWNSFVVKSLVAQQEKAAADVQLRGVPAMFVNGKYQLNPQGMDTSNMDVFVQQYADTVKYLSEKKGGGGSEQKPHIALLPSPGMGHLIPLVEFAKQFVLHHDFHITCIIPVLGSPSKAMKAVLQALPTTIDHVFLPPVILEEEEIKGLKFEVQTILTLTRSLPPLREVLKTTRFSAFVVDPFGIDALDIAKELNISPYIFFPSNAFALSLIFHLPKLDETVSCEYRDLPEPLKLPGCIPIHGRDLIEPVQDRTSELYKMFLRNAKRFRLAEGIIVNTFMELEGSAIKALLDEEAKNLPLYPIGPIQSGSSNLQVDKSVSDCLRWLDNQPHGSVLFVCFGSGGTLSYDQTNELALGLELSGQKFLWVVRTPNNESADAAYLSDQILDNNPLDFLPKGFVERTEGQGLAVPSWAPQAQVLSHGSTGGFLTHCGWNSTLESIMQGIPLIAWPLYAEQKMNAPLLAEDLKVALRPKTNKSGLIDQEEIAKVVKGLMIGEEGKKVYNRMKDIKMAAEKALSADGSSTKALSELASQWKNHPGF

SEQ ID NO: 205 - DNA, 2025 bp, artificial
  Artificial
atgaaggcccaatacgaagatggtaaacagtacactactttggaaaaaccagttgctggtgctccacaagttttggaatttttctctttcttctgcccacactgctaccaatttgaagaagtcttgcatatctccgacaacgtcaaaaagaaattgcctgaaggtgttaagatgaccaagtaccatgttaatttcatgggtggtgatttgggtaaagatttgactcaagcttgggctgttgctatggctttgggtgttgaagataaggttactgttcctttgttcgaaggtgttcaaaagacccaaactattagatccgcctccgatattagagatgttttcattaacgctggtatcaagggtgaagaatatgatgctgcttggaattccttcgttgttaagtctttggttgcccaacaagaaaaagctgctgctgatgttcaattgagaggtgttccagctatgttcgttaacggtaaataccaattgaacccacaaggtatggatacctctaacatggatgttttcgttcaacaatacgccgataccgttaagtacttgtctgaaaagaagggtggtggtggttctggtggtggcggtagcggaggtggtggtagtgaacagaagccacatattgccttgttgccatctccaggtatgggtcatttgattccattggttgaattcgctaagcaattcgtcttgcatcatgatttccatattacctgcatcatcccagttttgggttctccatctaaagctatgaaggctgttttacaagctttgccaactaccatcgatcatgtttttttgccaccagtcatcttggaagaagaagaaatcaagggtttgaagttcgaagtccaaaccattttgactttgaccagatctttaccaccattgagggaagttttgaaaaccactagattctccgctttcgttgttgatccatttggtattgatgctctggatatcgccaaagagttgaacatttctccctacattttcttcccatctaacgcttttgccctgtccttgatttttcatttgccaaagttggacgaaaccgtttcttgtgagtatagagatttgccagaaccattgaaattgccaggttgcattccaattcatggtagagacttgattgaaccagttcaagatagaacctctgagctgtacaagatgtttttgagaaacgccaagagattcagattggccgaaggtattatcgttaacaccttcatggaattggaaggttctgctattaaggccttgttggatgaagaagctaagaacttgccattatacccaattggtccaatccaatctggttcctctaacttacaagttgacaagtctgtttccgattgcttgagatggttggataatcaaccacatggttccgttttgttcgtttgttttggttctggtggtactttgtcctacgatcaaactaacgaattggccttgggtttagaattgtccggtcaaaagtttttgtgggttgttagaactccaaacaacgaatctgctgatgctgcttatttgtccgatcaaatcttggacaacaaccccttggattttttgcctaagggtttcgttgaaagaactgaaggtcaaggtttggctgttccatcttgggctccacaagctcaagttttgtctcatggttctactggtggtttcttgactcattgtggttggaattctaccttggaatccattatgcaaggtattccattgattgcttggccattatatgccgaacaaaagatgaatgctcctttgttggcagaagatttgaaagttgctttgaggccaaagactaacaagtccggtttgattgatcaagaagagattgccaaggttgttaagggtttaatgattggtgaagagggcaaaaaggtctacaatagaatgaaggatattaagatggctgccgagaaagctttgtcagctgatggttcttctactaaggctttatctgaattggcttcccaatggaaaaatcacccaggtttctaa

SEQ ID NO: 206 - protein, 674 aa, artificial
  Artificial
MKAQYEDGKQYTTLEKPVAGAPQVLEFFSFFCPHCYQFEEVLHISDNVKKKLPEGVKMTKYHVNFMGGDLGKDLTQAWAVAMALGVEDKVTVPLFEGVQKTQTIRSASDIRDVFINAGIKGEEYDAAWNSFVVKSLVAQQEKAAADVQLRGVPAMFVNGKYQLNPQGMDTSNMDVFVQQYADTVKYLSEKKGGGGSGGGGSGGGGSEQKPHIALLPSPGMGHLIPLVEFAKQFVLHHDFHITCIIPVLGSPSKAMKAVLQALPTTIDHVFLPPVILEEEEIKGLKFEVQTILTLTRSLPPLREVLKTTRFSAFVVDPFGIDALDIAKELNISPYIFFPSNAFALSLIFHLPKLDETVSCEYRDLPEPLKLPGCIPIHGRDLIEPVQDRTSELYKMFLRNAKRFRLAEGIIVNTFMELEGSAIKALLDEEAKNLPLYPIGPIQSGSSNLQVDKSVSDCLRWLDNQPHGSVLFVCFGSGGTLSYDQTNELALGLELSGQKFLWVVRTPNNESADAAYLSDQILDNNPLDFLPKGFVERTEGQGLAVPSWAPQAQVLSHGSTGGFLTHCGWNSTLESIMQGIPLIAWPLYAEQKMNAPLLAEDLKVALRPKTNKSGLIDQEEIAKVVKGLMIGEEGKKVYNRMKDIKMAAEKALSADGSSTKALSELASQWKNHPGF

SEQ ID NO: 207 - DNA, 2907 bp, artificial
  Artificial
atgaacaaagaaatcttggccgttgttgaagccgtttctaacgaaaaagctttgccaagagaaaagatcttcgaagctttggaatctgctttggctactgctactaagaagaagtacgaacaagaaatcgatgtcagagtccaaatcgatagaaagtctggtgatttcgataccttcagaagatggttggttgttgatgaagttacccaacctaccaaagaaattacattggaagctgccagatacgaggatgaatctttgaatttgggtgactacgtcgaagatcaaatcgaatctgttaccttcgatagaatcactactcaaaccgctaagcaagttatcgttcaaaaggttagagaagctgaaagagctatggttgtcgatcaattcagagaacatgaaggtgaaattatcaccggtgttgttaagaaggttaacagggataacatctccttggatttgggtaacaatgccgaagctgttatcttgagagaagatatgttacccagagaaaacttcagaccaggtgatagagttagaggtgtcttgtattctgttagacctgaagctagaggtgctcagttgtttgttactagatctaagccagaaatgctgatcgagttgttcagaattgaagttccagaaatcggtgaagaagtcattgaaatcaaagctgctgctagagatccaggttctagagctaaaattgctgttaagaccaacgacaagagaattgatccagttggtgcttgtgttggtatgagaggtgctagagttcaagctgtttctactgaattaggtggtgaaagaatcgatatcgttttgtgggatgataacccagctcaattcgttattaacgctatggctccagctgatgttgcttctatagttgttgacgaagataagcacaccatggatattgctgttgaagctggtaatttggctcaagctattggtagaaatggtcagaatgttagattggcctctcaattgtctggttgggaattgaatgttatgaccgttgatgacttgcaagctaaacatcaagctgaagctcatgctgctattgatactttcactaagtacttggacatcgacgaagatttcgctactgttttggttgaagaaggtttctctaccttggaagaattggcttatgttcccatgaaggaactgttggaaattgaaggtttggatgaacctacagttgaagctttgagagaaagggctaaaaatgctttggcaactattgctcaagctcaagaagaatctttgggcgataacaaaccagcagatgatttgttgaacttggaaggtgttgatagagatttggcttttaagttggctgcaagaggtgtatgtactttagaagatttggccgaacaaggtattgatgatttggctgatatagaaggtttgaccgatgagaaggctggtgctttgattatggctgctagaaatatttgttggttcggtgacgaagctggtggtggtggttctgaacagaagccacatattgccttgttgccatctccaggtatgggtcatttgattccattggttgaattcgctaagcaattcgtcttgcatcatgatttccatattacctgcatcatcccagttttgggttctccatctaaagctatgaaggctgttttacaagctttgccaactaccatcgatcatgtttttttgccaccagtcatcttggaagaagaagaaatcaagggtttgaagttcgaagtccaaaccattttgactttgaccagatctttaccaccattgagggaagttttgaaaaccactagattctccgctttcgttgttgatccatttggtattgatgctctggatatcgccaaagagttgaacatttctccctacattttcttcccatctaacgcttttgccctgtccttgatttttcatttgccaaagttggacgaaaccgtttcttgtgagtatagagatttgccagaaccattgaaattgccaggttgcattccaattcatggtagagacttgattgaaccagttcaagatagaacctctgagctgtacaagatgtttttgagaaacgccaagagattcagattggccgaaggtattatcgttaacaccttcatggaattggaaggttctgctattaaggccttgttggatgaagaagctaagaacttgccattatacccaattggtccaatccaatctggttcctctaacttacaagttgacaagtctgtttccgattgcttgagatggttggataatcaaccacatggttccgttttgttcgtttgttttggttctggtggtactttgtcctacgatcaaactaacgaattggccttgggtttagaattgtccggtcaaaagtttttgtgggttgttagaactccaaacaacgaatctgctgatgctgcttatttgtccgatcaaatcttggacaacaaccccttggattttttgcctaagggtttcgttgaaagaactgaaggtcaaggtttggctgttccatcttgggctccacaagctcaagttttgtctcatggttctactggtggtttcttgactcattgtggttggaattctaccttggaatccattatgcaaggtattccattgattgcttggccattatatgccgaacaaaagatgaatgctcctttgttggcagaagatttgaaagttgctttgaggccaaagactaacaagtccggtttgattgatcaagaagagattgccaaggttgttaagggtttaatgattggtgaagagggcaaaaaggtctacaatagaatgaaggatattaagatggctgccgagaaagctttgtcagctgatggttcttctactaaggctttatctgaattggcttcccaatggaaaaatcacccaggtttctaa

SEQ ID NO: 208 - protein, 968 aa, artificial
  Artificial
MNKEILAVVEAVSNEKALPREKIFEALESALATATKKKYEQEIDVRVQIDRKSGDFDTFRRWLVVDEVTQPTKEITLEAARYEDESLNLGDYVEDQIESVTFDRITTQTAKQVIVQKVREAERAMVVDQFREHEGEIITGVVKKVNRDNISLDLGNNAEAVILREDMLPRENFRPGDRVRGVLYSVRPEARGAQLFVTRSKPEMLIELFRIEVPEIGEEVIEIKAAARDPGSRAKIAVKTNDKRIDPVGACVGMRGARVQAVSTELGGERIDIVLWDDNPAQFVINAMAPADVASIVVDEDKHTMDIAVEAGNLAQAIGRNGQNVRLASQLSGWELNVMTVDDLQAKHQAEAHAAIDTFTKYLDIDEDFATVLVEEGFSTLEELAYVPMKELLEIEGLDEPTVEALRERAKNALATIAQAQEESLGDNKPADDLLNLEGVDRDLAFKLAARGVCTLEDLAEQGIDDLADIEGLTDEKAGALIMAARNICWFGDEAGGGGSEQKPHIALLPSPGMGHLIPLVEFAKQFVLHHDFHITCIIPVLGSPSKAMKAVLQALPTTIDHVFLPPVILEEEEIKGLKFEVQTILTLTRSLPPLREVLKTTRFSAFVVDPFGIDALDIAKELNISPYIFFPSNAFALSLIFHLPKLDETVSCEYRDLPEPLKLPGCIPIHGRDLIEPVQDRTSELYKMFLRNAKRFRLAEGIIVNTFMELEGSAIKALLDEEAKNLPLYPIGPIQSGSSNLQVDKSVSDCLRWLDNQPHGSVLFVCFGSGGTLSYDQTNELALGLELSGQKFLWVVRTPNNESADAAYLSDQILDNNPLDFLPKGFVERTEGQGLAVPSWAPQAQVLSHGSTGGFLTHCGWNSTLESIMQGIPLIAWPLYAEQKMNAPLLAEDLKVALRPKTNKSGLIDQEEIAKVVKGLMIGEEGKKVYNRMKDIKMAAEKALSADGSSTKALSELASQWKNHPGF

SEQ ID NO: 209 - DNA, 2937 bp, artificial
  Artificial
atgaacaaagaaatcttggccgttgttgaagccgtttctaacgaaaaagctttgccaagagaaaagatcttcgaagctttggaatctgctttggctactgctactaagaagaagtacgaacaagaaatcgatgtcagagtccaaatcgatagaaagtctggtgatttcgataccttcagaagatggttggttgttgatgaagttacccaacctaccaaagaaattacattggaagctgccagatacgaggatgaatctttgaatttgggtgactacgtcgaagatcaaatcgaatctgttaccttcgatagaatcactactcaaaccgctaagcaagttatcgttcaaaaggttagagaagctgaaagagctatggttgtcgatcaattcagagaacatgaaggtgaaattatcaccggtgttgttaagaaggttaacagggataacatctccttggatttgggtaacaatgccgaagctgttatcttgagagaagatatgttacccagagaaaacttcagaccaggtgatagagttagaggtgtcttgtattctgttagacctgaagctagaggtgctcagttgtttgttactagatctaagccagaaatgctgatcgagttgttcagaattgaagttccagaaatcggtgaagaagtcattgaaatcaaagctgctgctagagatccaggttctagagctaaaattgctgttaagaccaacgacaagagaattgatccagttggtgcttgtgttggtatgagaggtgctagagttcaagctgtttctactgaattaggtggtgaaagaatcgatatcgttttgtgggatgataacccagctcaattcgttattaacgctatggctccagctgatgttgcttctatagttgttgacgaagataagcacaccatggatattgctgttgaagctggtaatttggctcaagctattggtagaaatggtcagaatgttagattggcctctcaattgtctggttgggaattgaatgttatgaccgttgatgacttgcaagctaaacatcaagctgaagctcatgctgctattgatactttcactaagtacttggacatcgacgaagatttcgctactgttttggttgaagaaggtttctctaccttggaagaattggcttatgttcccatgaaggaactgttggaaattgaaggtttggatgaacctacagttgaagctttgagagaaagggctaaaaatgctttggcaactattgctcaagctcaagaagaatctttgggcgataacaaaccagcagatgatttgttgaacttggaaggtgttgatagagatttggcttttaagttggctgcaagaggtgtatgtactttagaagatttggccgaacaaggtattgatgatttggctgatatagaaggtttgaccgatgagaaggctggtgctttgattatggctgctagaaatatttgttggttcggtgacgaagctggtggtggtggttctggtggtggcggtagcggaggtggtggtagtgaacagaagccacatattgccttgttgccatctccaggtatgggtcatttgattccattggttgaattcgctaagcaattcgtcttgcatcatgatttccatattacctgcatcatcccagttttgggttctccatctaaagctatgaaggctgttttacaagctttgccaactaccatcgatcatgtttttttgccaccagtcatcttggaagaagaagaaatcaagggtttgaagttcgaagtccaaaccattttgactttgaccagatctttaccaccattgagggaagttttgaaaaccactagattctccgctttcgttgttgatccatttggtattgatgctctggatatcgccaaagagttgaacatttctccctacattttcttcccatctaacgcttttgccctgtccttgatttttcatttgccaaagttggacgaaaccgtttcttgtgagtatagagatttgccagaaccattgaaattgccaggttgcattccaattcatggtagagacttgattgaaccagttcaagatagaacctctgagctgtacaagatgtttttgagaaacgccaagagattcagattggccgaaggtattatcgttaacaccttcatggaattggaaggttctgctattaaggccttgttggatgaagaagctaagaacttgccattatacccaattggtccaatccaatctggttcctctaacttacaagttgacaagtctgtttccgattgcttgagatggttggataatcaaccacatggttccgttttgttcgtttgttttggttctggtggtactttgtcctacgatcaaactaacgaattggccttgggtttagaattgtccggtcaaaagtttttgtgggttgttagaactccaaacaacgaatctgctgatgctgcttatttgtccgatcaaatcttggacaacaaccccttggattttttgcctaagggtttcgttgaaagaactgaaggtcaaggtttggctgttccatcttgggctccacaagctcaagttttgtctcatggttctactggtggtttcttgactcattgtggttggaattctaccttggaatccattatgcaaggtattccattgattgcttggccattatatgccgaacaaaagatgaatgctcctttgttggcagaagatttgaaagttgctttgaggccaaagactaacaagtccggtttgattgatcaagaagagattgccaaggttgttaagggtttaatgattggtgaagagggcaaaaaggtctacaatagaatgaaggatattaagatggctgccgagaaagctttgtcagctgatggttcttctactaaggctttatctgaattggcttcccaatggaaaaatcacccaggtttctaa

SEQ ID NO: 210 - protein, 978 aa, artificial
  Artificial
MNKEILAVVEAVSNEKALPREKIFEALESALATATKKKYEQEIDVRVQIDRKSGDFDTFRRWLVVDEVTQPTKEITLEAARYEDESLNLGDYVEDQIESVTFDRITTQTAKQVIVQKVREAERAMVVDQFREHEGEIITGVVKKVNRDNISLDLGNNAEAVILREDMLPRENFRPGDRVRGVLYSVRPEARGAQLFVTRSKPEMLIELFRIEVPEIGEEVIEIKAAARDPGSRAKIAVKTNDKRIDPVGACVGMRGARVQAVSTELGGERIDIVLWDDNPAQFVINAMAPADVASIVVDEDKHTMDIAVEAGNLAQAIGRNGQNVRLASQLSGWELNVMTVDDLQAKHQAEAHAAIDTFTKYLDIDEDFATVLVEEGFSTLEELAYVPMKELLEIEGLDEPTVEALRERAKNALATIAQAQEESLGDNKPADDLLNLEGVDRDLAFKLAARGVCTLEDLAEQGIDDLADIEGLTDEKAGALIMAARNICWFGDEAGGGGSGGGGSGGGGSEQKPHIALLPSPGMGHLIPLVEFAKQFVLHHDFHITCIIPVLGSPSKAMKAVLQALPTTIDHVFLPPVILEEEEIKGLKFEVQTILTLTRSLPPLREVLKTTRFSAFVVDPFGIDALDIAKELNISPYIFFPSNAFALSLIFHLPKLDETVSCEYRDLPEPLKLPGCIPIHGRDLIEPVQDRTSELYKMFLRNAKRFRLAEGIIVNTFMELEGSAIKALLDEEAKNLPLYPIGPIQSGSSNLQVDKSVSDCLRWLDNQPHGSVLFVCFGSGGTLSYDQTNELALGLELSGQKFLWVVRTPNNESADAAYLSDQILDNNPLDFLPKGFVERTEGQGLAVPSWAPQAQVLSHGSTGGFLTHCGWNSTLESIMQGIPLIAWPLYAEQKMNAPLLAEDLKVALRPKTNKSGLIDQEEIAKVVKGLMIGEEGKKVYNRMKDIKMAAEKALSADGSSTKALSELASQWKNHPGF

SEQ ID NO: 211 - DNA, 1659 bp, artificial
  Artificial
atggaaacccacatcaacttgaaggtttctgatggttcctccgaaatcttcttcaagatcaaaaagactaccccactgagaagattgatggaagcttttgctaagagacagggtaaagaaatggactccttgagattcttgtacgacggtattagaattcaagctgatcaaacccctgaagatttggacatggaagataacgatattatcgaagcccacagagaacaaattggtggtggtggtggtggttctgaacagaagccacatattgccttgttgccatctccaggtatgggtcatttgattccattggttgaattcgctaagcaattcgtcttgcatcatgatttccatattacctgcatcatcccagttttgggttctccatctaaagctatgaaggctgttttacaagctttgccaactaccatcgatcatgtttttttgccaccagtcatcttggaagaagaagaaatcaagggtttgaagttcgaagtccaaaccattttgactttgaccagatctttaccaccattgagggaagttttgaaaaccactagattctccgctttcgttgttgatccatttggtattgatgctctggatatcgccaaagagttgaacatttctccctacattttcttcccatctaacgcttttgccctgtccttgatttttcatttgccaaagttggacgaaaccgtttcttgtgagtatagagatttgccagaaccattgaaattgccaggttgcattccaattcatggtagagacttgattgaaccagttcaagatagaacctctgagctgtacaagatgtttttgagaaacgccaagagattcagattggccgaaggtattatcgttaacaccttcatggaattggaaggttctgctattaaggccttgttggatgaagaagctaagaacttgccattatacccaattggtccaatccaatctggttcctctaacttacaagttgacaagtctgtttccgattgcttgagatggttggataatcaaccacatggttccgttttgttcgtttgttttggttctggtggtactttgtcctacgatcaaactaacgaattggccttgggtttagaattgtccggtcaaaagtttttgtgggttgttagaactccaaacaacgaatctgctgatgctgcttatttgtccgatcaaatcttggacaacaaccccttggattttttgcctaagggtttcgttgaaagaactgaaggtcaaggtttggctgttccatcttgggctccacaagctcaagttttgtctcatggttctactggtggtttcttgactcattgtggttggaattctaccttggaatccattatgcaaggtattccattgattgcttggccattatatgccgaacaaaagatgaatgctcctttgttggcagaagatttgaaagttgctttgaggccaaagactaacaagtccggtttgattgatcaagaagagattgccaaggttgttaagggtttaatgattggtgaagagggcaaaaaggtctacaatagaatgaaggatattaagatggctgccgagaaagctttgtcagctgatggttcttctactaaggctttatctgaattggcttcccaatggaaaaatcacccaggtttctaa

SEQ ID NO: 212 - protein, 552 aa, artificial
  Artificial
METHINLKVSDGSSEIFFKIKKTTPLRRLMEAFAKRQGKEMDSLRFLYDGIRIQADQTPEDLDMEDNDIIEAHREQIGGGGGGSEQKPHIALLPSPGMGHLIPLVEFAKQFVLHHDFHITCIIPVLGSPSKAMKAVLQALPTTIDHVFLPPVILEEEEIKGLKFEVQTILTLTRSLPPLREVLKTTRFSAFVVDPFGIDALDIAKELNISPYIFFPSNAFALSLIFHLPKLDETVSCEYRDLPEPLKLPGCIPIHGRDLIEPVQDRTSELYKMFLRNAKRFRLAEGIIVNTFMELEGSAIKALLDEEAKNLPLYPIGPIQSGSSNLQVDKSVSDCLRWLDNQPHGSVLFVCFGSGGTLSYDQTNELALGLELSGQKFLWVVRTPNNESADAAYLSDQILDNNPLDFLPKGFVERTEGQGLAVPSWAPQAQVLSHGSTGGFLTHCGWNSTLESIMQGIPLIAWPLYAEQKMNAPLLAEDLKVALRPKTNKSGLIDQEEIAKVVKGLMIGEEGKKVYNRMKDIKMAAEKALSADGSSTKALSELASQWKNHPGF

SEQ ID NO: 213 - DNA, 1689 bp, artificial
  Artificial
atggaaacccacatcaacttgaaggtttctgatggttcctccgaaatcttcttcaagatcaaaaagactaccccactgagaagattgatggaagcttttgctaagagacagggtaaagaaatggactccttgagattcttgtacgacggtattagaattcaagctgatcaaacccctgaagatttggacatggaagataacgatattatcgaagcccacagagaacaaattggtggtggtggtggtggttctggtggtggcggtagcggaggtggtggtagtgaacagaagccacatattgccttgttgccatctccaggtatgggtcatttgattccattggttgaattcgctaagcaattcgtcttgcatcatgatttccatattacctgcatcatcccagttttgggttctccatctaaagctatgaaggctgttttacaagctttgccaactaccatcgatcatgtttttttgccaccagtcatcttggaagaagaagaaatcaagggtttgaagttcgaagtccaaaccattttgactttgaccagatctttaccaccattgagggaagttttgaaaaccactagattctccgctttcgttgttgatccatttggtattgatgctctggatatcgccaaagagttgaacatttctccctacattttcttcccatctaacgcttttgccctgtccttgatttttcatttgccaaagttggacgaaaccgtttcttgtgagtatagagatttgccagaaccattgaaattgccaggttgcattccaattcatggtagagacttgattgaaccagttcaagatagaacctctgagctgtacaagatgtttttgagaaacgccaagagattcagattggccgaaggtattatcgttaacaccttcatggaattggaaggttctgctattaaggccttgttggatgaagaagctaagaacttgccattatacccaattggtccaatccaatctggttcctctaacttacaagttgacaagtctgtttccgattgcttgagatggttggataatcaaccacatggttccgttttgttcgtttgttttggttctggtggtactttgtcctacgatcaaactaacgaattggccttgggtttagaattgtccggtcaaaagtttttgtgggttgttagaactccaaacaacgaatctgctgatgctgcttatttgtccgatcaaatcttggacaacaaccccttggattttttgcctaagggtttcgttgaaagaactgaaggtcaaggtttggctgttccatcttgggctccacaagctcaagttttgtctcatggttctactggtggtttcttgactcattgtggttggaattctaccttggaatccattatgcaaggtattccattgattgcttggccattatatgccgaacaaaagatgaatgctcctttgttggcagaagatttgaaagttgctttgaggccaaagactaacaagtccggtttgattgatcaagaagagattgccaaggttgttaagggtttaatgattggtgaagagggcaaaaaggtctacaatagaatgaaggatattaagatggctgccgagaaagctttgtcagctgatggttcttctactaaggctttatctgaattggcttcccaatggaaaaatcacccaggtttctaa

SEQ ID NO: 214 - protein, 562 aa, artificial
  Artificial
METHINLKVSDGSSEIFFKIKKTTPLRRLMEAFAKRQGKEMDSLRFLYDGIRIQADQTPEDLDMEDNDIIEAHREQIGGGGGGSGGGGSGGGGSEQKPHIALLPSPGMGHLIPLVEFAKQFVLHHDFHITCIIPVLGSPSKAMKAVLQALPTTIDHVFLPPVILEEEEIKGLKFEVQTILTLTRSLPPLREVLKTTRFSAFVVDPFGIDALDIAKELNISPYIFFPSNAFALSLIFHLPKLDETVSCEYRDLPEPLKLPGCIPIHGRDLIEPVQDRTSELYKMFLRNAKRFRLAEGIIVNTFMELEGSAIKALLDEEAKNLPLYPIGPIQSGSSNLQVDKSVSDCLRWLDNQPHGSVLFVCFGSGGTLSYDQTNELALGLELSGQKFLWVVRTPNNESADAAYLSDQILDNNPLDFLPKGFVERTEGQGLAVPSWAPQAQVLSHGSTGGFLTHCGWNSTLESIMQGIPLIAWPLYAEQKMNAPLLAEDLKVALRPKTNKSGLIDQEEIAKVVKGLMIGEEGKKVYNRMKDIKMAAEKALSADGSSTKALSELASQWKNHPGF

SEQ ID NO: 215 - DNA, 2523 bp, artificial
  Artificial
atgaagatcgaagaaggcaagttggttatttggatcaatggtgataagggttacaacggtttggctgaagttggtaagaagttcgaaaaagacaccggtattaaggttaccgttgaacatccagataagctggaagaaaagtttccacaagttgctgctactggtgatggtccagatattatcttttgggctcatgatagatttggtggttatgctcaatctggtttgttggctgaaattacaccagataaggctttccaagataagttgtatccattcacttgggatgccgttagatacaacggtaaattgattgcttacccaattgctgttgaagccttgtctttgatctacaacaaagacttgttgcccaatccaccaaaaacctgggaagaaattccagctttggacaaagaattgaaggccaaaggtaaatccgccttgatgtttaacttgcaagaaccatatttcacgtggccattgattgcagctgatggtggttacgcttttaagtacgaaaatggcaagtacgatatcaaggatgttggtgttgataatgctggtgctaaagctggtttgactttcttggttgacctgattaagaacaagcacatgaacgctgataccgattactctattgctgaagctgcttttaacaagggtgaaactgctatgactattaacggtccatgggcttggtctaacattgatacttctaaggttaactacggtgttaccgttttgccaacttttaaaggtcaaccttctaagccattcgttggtgttttgtctgctggtattaacgctgcttctccaaacaaagaactggctaaagaattcctggaaaactacttgttgaccgacgaaggtttggaagctgttaacaaagataagccattgggtgctgttgctttgaagtcttatgaagaagaattggccaaggatccaagaattgctgcaactatggaaaatgctcaaaagggtgagattatgccaaacatcccacaaatgtctgctttttggtatgctgttagaaccgctgttatcaatgctgcttctggtagacaaactgttgatgaagctttgaaggatgctcaaaccggtggtggtggttctgaacagaagccacatattgccttgttgccatctccaggtatgggtcatttgattccattggttgaattcgctaagcaattcgtcttgcatcatgatttccatattacctgcatcatcccagttttgggttctccatctaaagctatgaaggctgttttacaagctttgccaactaccatcgatcatgtttttttgccaccagtcatcttggaagaagaagaaatcaagggtttgaagttcgaagtccaaaccattttgactttgaccagatctttaccaccattgagggaagttttgaaaaccactagattctccgctttcgttgttgatccatttggtattgatgctctggatatcgccaaagagttgaacatttctccctacattttcttcccatctaacgcttttgccctgtccttgatttttcatttgccaaagttggacgaaaccgtttcttgtgagtatagagatttgccagaaccattgaaattgccaggttgcattccaattcatggtagagacttgattgaaccagttcaagatagaacctctgagctgtacaagatgtttttgagaaacgccaagagattcagattggccgaaggtattatcgttaacaccttcatggaattggaaggttctgctattaaggccttgttggatgaagaagctaagaacttgccattatacccaattggtccaatccaatctggttcctctaacttacaagttgacaagtctgtttccgattgcttgagatggttggataatcaaccacatggttccgttttgttcgtttgttttggttctggtggtactttgtcctacgatcaaactaacgaattggccttgggtttagaattgtccggtcaaaagtttttgtgggttgttagaactccaaacaacgaatctgctgatgctgcttatttgtccgatcaaatcttggacaacaaccccttggattttttgcctaagggtttcgttgaaagaactgaaggtcaaggtttggctgttccatcttgggctccacaagctcaagttttgtctcatggttctactggtggtttcttgactcattgtggttggaattctaccttggaatccattatgcaaggtattccattgattgcttggccattatatgccgaacaaaagatgaatgctcctttgttggcagaagatttgaaagttgctttgaggccaaagactaacaagtccggtttgattgatcaagaagagattgccaaggttgttaagggtttaatgattggtgaagagggcaaaaaggtctacaatagaatgaaggatattaagatggctgccgagaaagctttgtcagctgatggttcttctactaaggctttatctgaattggcttcccaatggaaaaatcacccaggtttctaa

SEQ ID NO: 216 - protein, 840 aa, artificial
  Artificial
MKIEEGKLVIWINGDKGYNGLAEVGKKFEKDTGIKVTVEHPDKLEEKFPQVAATGDGPDIIFWAHDRFGGYAQSGLLAEITPDKAFQDKLYPFTWDAVRYNGKLIAYPIAVEALSLIYNKDLLPNPPKTWEEIPALDKELKAKGKSALMFNLQEPYFTWPLIAADGGYAFKYENGKYDIKDVGVDNAGAKAGLTFLVDLIKNKHMNADTDYSIAEAAFNKGETAMTINGPWAWSNIDTSKVNYGVTVLPTFKGQPSKPFVGVLSAGINAASPNKELAKEFLENYLLTDEGLEAVNKDKPLGAVALKSYEEELAKDPRIAATMENAQKGEIMPNIPQMSAFWYAVRTAVINAASGRQTVDEALKDAQTGGGGSEQKPHIALLPSPGMGHLIPLVEFAKQFVLHHDFHITCIIPVLGSPSKAMKAVLQALPTTIDHVFLPPVILEEEEIKGLKFEVQTILTLTRSLPPLREVLKTTRFSAFVVDPFGIDALDIAKELNISPYIFFPSNAFALSLIFHLPKLDETVSCEYRDLPEPLKLPGCIPIHGRDLIEPVQDRTSELYKMFLRNAKRFRLAEGIIVNTFMELEGSAIKALLDEEAKNLPLYPIGPIQSGSSNLQVDKSVSDCLRWLDNQPHGSVLFVCFGSGGTLSYDQTNELALGLELSGQKFLWVVRTPNNESADAAYLSDQILDNNPLDFLPKGFVERTEGQGLAVPSWAPQAQVLSHGSTGGFLTHCGWNSTLESIMQGIPLIAWPLYAEQKMNAPLLAEDLKVALRPKTNKSGLIDQEEIAKVVKGLMIGEEGKKVYNRMKDIKMAAEKALSADGSSTKALSELASQWKNHPGF

SEQ ID NO: 217 - DNA, 2553 bp, artificial
  Artificial
atgaagatcgaagaaggcaagttggttatttggatcaatggtgataagggttacaacggtttggctgaagttggtaagaagttcgaaaaagacaccggtattaaggttaccgttgaacatccagataagctggaagaaaagtttccacaagttgctgctactggtgatggtccagatattatcttttgggctcatgatagatttggtggttatgctcaatctggtttgttggctgaaattacaccagataaggctttccaagataagttgtatccattcacttgggatgccgttagatacaacggtaaattgattgcttacccaattgctgttgaagccttgtctttgatctacaacaaagacttgttgcccaatccaccaaaaacctgggaagaaattccagctttggacaaagaattgaaggccaaaggtaaatccgccttgatgtttaacttgcaagaaccatatttcacgtggccattgattgcagctgatggtggttacgcttttaagtacgaaaatggcaagtacgatatcaaggatgttggtgttgataatgctggtgctaaagctggtttgactttcttggttgacctgattaagaacaagcacatgaacgctgataccgattactctattgctgaagctgcttttaacaagggtgaaactgctatgactattaacggtccatgggcttggtctaacattgatacttctaaggttaactacggtgttaccgttttgccaacttttaaaggtcaaccttctaagccattcgttggtgttttgtctgctggtattaacgctgcttctccaaacaaagaactggctaaagaattcctggaaaactacttgttgaccgacgaaggtttggaagctgttaacaaagataagccattgggtgctgttgctttgaagtcttatgaagaagaattggccaaggatccaagaattgctgcaactatggaaaatgctcaaaagggtgagattatgccaaacatcccacaaatgtctgctttttggtatgctgttagaaccgctgttatcaatgctgcttctggtagacaaactgttgatgaagctttgaaggatgctcaaaccggtggtggtggttctggtggtggcggtagcggaggtggtggtagtgaacagaagccacatattgccttgttgccatctccaggtatgggtcatttgattccattggttgaattcgctaagcaattcgtcttgcatcatgatttccatattacctgcatcatcccagttttgggttctccatctaaagctatgaaggctgttttacaagctttgccaactaccatcgatcatgtttttttgccaccagtcatcttggaagaagaagaaatcaagggtttgaagttcgaagtccaaaccattttgactttgaccagatctttaccaccattgagggaagttttgaaaaccactagattctccgctttcgttgttgatccatttggtattgatgctctggatatcgccaaagagttgaacatttctccctacattttcttcccatctaacgcttttgccctgtccttgatttttcatttgccaaagttggacgaaaccgtttcttgtgagtatagagatttgccagaaccattgaaattgccaggttgcattccaattcatggtagagacttgattgaaccagttcaagatagaacctctgagctgtacaagatgtttttgagaaacgccaagagattcagattggccgaaggtattatcgttaacaccttcatggaattggaaggttctgctattaaggccttgttggatgaagaagctaagaacttgccattatacccaattggtccaatccaatctggttcctctaacttacaagttgacaagtctgtttccgattgcttgagatggttggataatcaaccacatggttccgttttgttcgtttgttttggttctggtggtactttgtcctacgatcaaactaacgaattggccttgggtttagaattgtccggtcaaaagtttttgtgggttgttagaactccaaacaacgaatctgctgatgctgcttatttgtccgatcaaatcttggacaacaaccccttggattttttgcctaagggtttcgttgaaagaactgaaggtcaaggtttggctgttccatcttgggctccacaagctcaagttttgtctcatggttctactggtggtttcttgactcattgtggttggaattctaccttggaatccattatgcaaggtattccattgattgcttggccattatatgccgaacaaaagatgaatgctcctttgttggcagaagatttgaaagttgctttgaggccaaagactaacaagtccggtttgattgatcaagaagagattgccaaggttgttaagggtttaatgattggtgaagagggcaaaaaggtctacaatagaatgaaggatattaagatggctgccgagaaagctttgtcagctgatggttcttctactaaggctttatctgaattggcttcccaatggaaaaatcacccaggtttctaa

SEQ ID NO: 218 - protein, 850 aa, artificial
  Artificial
MKIEEGKLVIWINGDKGYNGLAEVGKKFEKDTGIKVTVEHPDKLEEKFPQVAATGDGPDIIFWAHDRFGGYAQSGLLAEITPDKAFQDKLYPFTWDAVRYNGKLIAYPIAVEALSLIYNKDLLPNPPKTWEEIPALDKELKAKGKSALMFNLQEPYFTWPLIAADGGYAFKYENGKYDIKDVGVDNAGAKAGLTFLVDLIKNKHMNADTDYSIAEAAFNKGETAMTINGPWAWSNIDTSKVNYGVTVLPTFKGQPSKPFVGVLSAGINAASPNKELAKEFLENYLLTDEGLEAVNKDKPLGAVALKSYEEELAKDPRIAATMENAQKGEIMPNIPQMSAFWYAVRTAVINAASGRQTVDEALKDAQTGGGGSGGGGSGGGGSEQKPHIALLPSPGMGHLIPLVEFAKQFVLHHDFHITCIIPVLGSPSKAMKAVLQALPTTIDHVFLPPVILEEEEIKGLKFEVQTILTLTRSLPPLREVLKTTRFSAFVVDPFGIDALDIAKELNISPYIFFPSNAFALSLIFHLPKLDETVSCEYRDLPEPLKLPGCIPIHGRDLIEPVQDRTSELYKMFLRNAKRFRLAEGIIVNTFMELEGSAIKALLDEEAKNLPLYPIGPIQSGSSNLQVDKSVSDCLRWLDNQPHGSVLFVCFGSGGTLSYDQTNELALGLELSGQKFLWVVRTPNNESADAAYLSDQILDNNPLDFLPKGFVERTEGQGLAVPSWAPQAQVLSHGSTGGFLTHCGWNSTLESIMQGIPLIAWPLYAEQKMNAPLLAEDLKVALRPKTNKSGLIDQEEIAKVVKGLMIGEEGKKVYNRMKDIKMAAEKALSADGSSTKALSELASQWKNHPGF

SEQ ID NO: 219 - DNA, 2139 bp, artificial
  Artificial
atggtgtctaaaggtgaagagttgttcactggtgttgttccaattttggttgaattggatggtgatgttaacggccataagttttctgtttctggtgaaggtgagggtgatgctacttatggtaaattgactttgaagttcatctgcaccacaggtaaattgccagttccatggccaactttggttactacttttggttatggtgttcaatgcttcgctagatacccagatcatatgaagcaacacgatttcttcaaatccgctatgccagaaggttacgttcaagaaagaaccatcttcttcaaggatgacggtaactacaaaactagagccgaagttaagttcgaaggtgataccttggttaacaggattgaattgaagggcatcgattttaaagaggacggtaacattttgggtcacaagttggagtacaactacaactctcataacgtttacatcatggccgacaagcaaaagaacggtattaaggttaacttcaagatcaggcacaacatcgaagatggtagtgttcaattggctgatcactaccaacaaaacactccaattggtgatggtccagttttgttgccagataaccattacttgtctacccaatctgctttgtctaaggatccaaacgaaaagcgtgatcacatggtcttgttggaatttgttactgctgctggtattacccatggtatggatgaattatacaagggtggtggtggttctgaacagaagccacatattgccttgttgccatctccaggtatgggtcatttgattccattggttgaattcgctaagcaattcgtcttgcatcatgatttccatattacctgcatcatcccagttttgggttctccatctaaagctatgaaggctgttttacaagctttgccaactaccatcgatcatgtttttttgccaccagtcatcttggaagaagaagaaatcaagggtttgaagttcgaagtccaaaccattttgactttgaccagatctttaccaccattgagggaagttttgaaaaccactagattctccgctttcgttgttgatccatttggtattgatgctctggatatcgccaaagagttgaacatttctccctacattttcttcccatctaacgcttttgccctgtccttgatttttcatttgccaaagttggacgaaaccgtttcttgtgagtatagagatttgccagaaccattgaaattgccaggttgcattccaattcatggtagagacttgattgaaccagttcaagatagaacctctgagctgtacaagatgtttttgagaaacgccaagagattcagattggccgaaggtattatcgttaacaccttcatggaattggaaggttctgctattaaggccttgttggatgaagaagctaagaacttgccattatacccaattggtccaatccaatctggttcctctaacttacaagttgacaagtctgtttccgattgcttgagatggttggataatcaaccacatggttccgttttgttcgtttgttttggttctggtggtactttgtcctacgatcaaactaacgaattggccttgggtttagaattgtccggtcaaaagtttttgtgggttgttagaactccaaacaacgaatctgctgatgctgcttatttgtccgatcaaatcttggacaacaaccccttggattttttgcctaagggtttcgttgaaagaactgaaggtcaaggtttggctgttccatcttgggctccacaagctcaagttttgtctcatggttctactggtggtttcttgactcattgtggttggaattctaccttggaatccattatgcaaggtattccattgattgcttggccattatatgccgaacaaaagatgaatgctcctttgttggcagaagatttgaaagttgctttgaggccaaagactaacaagtccggtttgattgatcaagaagagattgccaaggttgttaagggtttaatgattggtgaagagggcaaaaaggtctacaatagaatgaaggatattaagatggctgccgagaaagctttgtcagctgatggttcttctactaaggctttatctgaattggcttcccaatggaaaaatcacccaggtttctaa

SEQ ID NO: 220 - protein, 712 aa, artificial
  Artificial
MVSKGEELFTGVVPILVELDGDVNGHKFSVSGEGEGDATYGKLTLKFICTTGKLPVPWPTLVTTFGYGVQCFARYPDHMKQHDFFKSAMPEGYVQERTIFFKDDGNYKTRAEVKFEGDTLVNRIELKGIDFKEDGNILGHKLEYNYNSHNVYIMADKQKNGIKVNFKIRHNIEDGSVQLADHYQQNTPIGDGPVLLPDNHYLSTQSALSKDPNEKRDHMVLLEFVTAAGITHGMDELYKGGGGSEQKPHIALLPSPGMGHLIPLVEFAKQFVLHHDFHITCIIPVLGSPSKAMKAVLQALPTTIDHVFLPPVILEEEEIKGLKFEVQTILTLTRSLPPLREVLKTTRFSAFVVDPFGIDALDIAKELNISPYIFFPSNAFALSLIFHLPKLDETVSCEYRDLPEPLKLPGCIPIHGRDLIEPVQDRTSELYKMFLRNAKRFRLAEGIIVNTFMELEGSAIKALLDEEAKNLPLYPIGPIQSGSSNLQVDKSVSDCLRWLDNQPHGSVLFVCFGSGGTLSYDQTNELALGLELSGQKFLWVVRTPNNESADAAYLSDQILDNNPLDFLPKGFVERTEGQGLAVPSWAPQAQVLSHGSTGGFLTHCGWNSTLESIMQGIPLIAWPLYAEQKMNAPLLAEDLKVALRPKTNKSGLIDQEEIAKVVKGLMIGEEGKKVYNRMKDIKMAAEKALSADGSSTKALSELASQWKNHPGF

SEQ ID NO: 221 - DNA, 2169 bp, artificial
  Artificial
atggtgtctaaaggtgaagagttgttcactggtgttgttccaattttggttgaattggatggtgatgttaacggccataagttttctgtttctggtgaaggtgagggtgatgctacttatggtaaattgactttgaagttcatctgcaccacaggtaaattgccagttccatggccaactttggttactacttttggttatggtgttcaatgcttcgctagatacccagatcatatgaagcaacacgatttcttcaaatccgctatgccagaaggttacgttcaagaaagaaccatcttcttcaaggatgacggtaactacaaaactagagccgaagttaagttcgaaggtgataccttggttaacaggattgaattgaagggcatcgattttaaagaggacggtaacattttgggtcacaagttggagtacaactacaactctcataacgtttacatcatggccgacaagcaaaagaacggtattaaggttaacttcaagatcaggcacaacatcgaagatggtagtgttcaattggctgatcactaccaacaaaacactccaattggtgatggtccagttttgttgccagataaccattacttgtctacccaatctgctttgtctaaggatccaaacgaaaagcgtgatcacatggtcttgttggaatttgttactgctgctggtattacccatggtatggatgaattatacaagggtggtggtggttctggtggtggcggtagcggaggtggtggtagtgaacagaagccacatattgccttgttgccatctccaggtatgggtcatttgattccattggttgaattcgctaagcaattcgtcttgcatcatgatttccatattacctgcatcatcccagttttgggttctccatctaaagctatgaaggctgttttacaagctttgccaactaccatcgatcatgtttttttgccaccagtcatcttggaagaagaagaaatcaagggtttgaagttcgaagtccaaaccattttgactttgaccagatctttaccaccattgagggaagttttgaaaaccactagattctccgctttcgttgttgatccatttggtattgatgctctggatatcgccaaagagttgaacatttctccctacattttcttcccatctaacgcttttgccctgtccttgatttttcatttgccaaagttggacgaaaccgtttcttgtgagtatagagatttgccagaaccattgaaattgccaggttgcattccaattcatggtagagacttgattgaaccagttcaagatagaacctctgagctgtacaagatgtttttgagaaacgccaagagattcagattggccgaaggtattatcgttaacaccttcatggaattggaaggttctgctattaaggccttgttggatgaagaagctaagaacttgccattatacccaattggtccaatccaatctggttcctctaacttacaagttgacaagtctgtttccgattgcttgagatggttggataatcaaccacatggttccgttttgttcgtttgttttggttctggtggtactttgtcctacgatcaaactaacgaattggccttgggtttagaattgtccggtcaaaagtttttgtgggttgttagaactccaaacaacgaatctgctgatgctgcttatttgtccgatcaaatcttggacaacaaccccttggattttttgcctaagggtttcgttgaaagaactgaaggtcaaggtttggctgttccatcttgggctccacaagctcaagttttgtctcatggttctactggtggtttcttgactcattgtggttggaattctaccttggaatccattatgcaaggtattccattgattgcttggccattatatgccgaacaaaagatgaatgctcctttgttggcagaagatttgaaagttgctttgaggccaaagactaacaagtccggtttgattgatcaagaagagattgccaaggttgttaagggtttaatgattggtgaagagggcaaaaaggtctacaatagaatgaaggatattaagatggctgccgagaaagctttgtcagctgatggttcttctactaaggctttatctgaattggcttcccaatggaaaaatcacccaggtttctaa

SEQ ID NO: 222 - protein, 722 aa, artificial
  Artificial
MVSKGEELFTGVVPILVELDGDVNGHKFSVSGEGEGDATYGKLTLKFICTTGKLPVPWPTLVTTFGYGVQCFARYPDHMKQHDFFKSAMPEGYVQERTIFFKDDGNYKTRAEVKFEGDTLVNRIELKGIDFKEDGNILGHKLEYNYNSHNVYIMADKQKNGIKVNFKIRHNIEDGSVQLADHYQQNTPIGDGPVLLPDNHYLSTQSALSKDPNEKRDHMVLLEFVTAAGITHGMDELYKGGGGSGGGGSGGGGSEQKPHIALLPSPGMGHLIPLVEFAKQFVLHHDFHITCIIPVLGSPSKAMKAVLQALPTTIDHVFLPPVILEEEEIKGLKFEVQTILTLTRSLPPLREVLKTTRFSAFVVDPFGIDALDIAKELNISPYIFFPSNAFALSLIFHLPKLDETVSCEYRDLPEPLKLPGCIPIHGRDLIEPVQDRTSELYKMFLRNAKRFRLAEGIIVNTFMELEGSAIKALLDEEAKNLPLYPIGPIQSGSSNLQVDKSVSDCLRWLDNQPHGSVLFVCFGSGGTLSYDQTNELALGLELSGQKFLWVVRTPNNESADAAYLSDQILDNNPLDFLPKGFVERTEGQGLAVPSWAPQAQVLSHGSTGGFLTHCGWNSTLESIMQGIPLIAWPLYAEQKMNAPLLAEDLKVALRPKTNKSGLIDQEEIAKVVKGLMIGEEGKKVYNRMKDIKMAAEKALSADGSSTKALSELASQWKNHPGF

SEQ ID NO: 223 - DNA, 1122 bp, artificial
  Artificial
atggaaaaccagaaagaaaccaccatcaccatttctaaggataccaacactactccaatgaccactgaagtttctttgttcgctagaaagaccctgttgattttgaactgcttgttgttgtctattggtacttgtggtggtccattgattatgaggttgtactttgttcatggtggttccagagtttggttatcttctgttttacaaactgctggcttcccattcattattgccgttattatcatcctgtatttctgcagatcagccgttgctaagaatcaaaacaacaagactaccaagctgttctatatgaggccaagattattcttagccgccgttttcattggtttgattactggtttggacaactacttgtatgcttacggtgttgctagattgccagtttctacttcctctttgattatcgctttccaattggctttcactgctttctttgcttacttggttgtcaagttgaagttcaccccatactctgttaatgccgttgttttgttgactgttggtgctggtgttttggctttacatgcttcttcagatagaccagaaggtgagtctaagaaagaatacactatgggtttcgtcatgactttgatggctgctttggtttacggttttttgttgccattgatcgagttgacttacaacaaggcccaacaagaaattacctacaccttggttttggaaatccagatggttttgtctttgtttgctaccgttttctgcgttgttggtatgatcgttaacaacgatttccaagtcattccaagagaagcctctaagtttgaatttggtgctaccaagtactatatcatcttgtgtgcttcagccttgatttggcaatgttactttttgggtgctatcggcgttattttctgttcttctgctttgttgtccggcatcatcatttctgttttgctgccagttattgaagttttggctgtcgtgttctacaaagaaaagttccaagctgaaaagggtgtctctttggttttatctttatggggtttcgcctcttacttttacggtgagtacaaggttactaagaaagccaagagatgtaacaccttctcctctactattaacggtgcttgtttgtcctga

SEQ ID NO: 224 - protein, 373 aa, artificial
  Artificial
MENQKETTITISKDTNTTPMTTEVSLFARKTLLILNCLLLSIGTCGGPLIMRLYFVHGGSRVWLSSVLQTAGFPFIIAVIIILYFCRSAVAKNQNNKTTKLFYMRPRLFLAAVFIGLITGLDNYLYAYGVARLPVSTSSLIIAFQLAFTAFFAYLVVKLKFTPYSVNAVVLLTVGAGVLALHASSDRPEGESKKEYTMGFVMTLMAALVYGFLLPLIELTYNKAQQEITYTLVLEIQMVLSLFATVFCVVGMIVNNDFQVIPREASKFEFGATKYYIILCASALIWQCYFLGAIGVIFCSSALLSGIIISVLLPVIEVLAVVFYKEKFQAEKGVSLVLSLWGFASYFYGEYKVTKKAKRCNTFSSTINGACLS

SEQ ID NO: 225 - DNA, 1059 bp, artificial
  Artificial
atgaagagggccttgttgatcttcaactgtttgttgttggctgttggtaattgtggtggtccattgattatgaggttgtactttgttcatggtggtaagagagtttggttgtcatcttggttggaaactggtggttggccaatgatttttatcccattgatcttctcgtacttccacagaagaagatctgctgctttggaatcttctgaatctgctaacaagacgaagatgattttcatgaagccaaggttgtttttggcctctgctgttattggtattatcaccggttttgacgattacttgtatgcttatggtgttgccagattgccagtttctacttccgctttgattattgctactcaattggcttttactgctggtttcgcttacttgttggttaagcaaaagttcacctcctactccattaacgccgttgttttgattactattggtggtgctgttttggccttgcatacttctggtgatagacctgctggtgtttctactaagcagtatattgctggttttttgatgactttggctgctgctgcattatacggttttgttttgccattggttgagctgacttacaagaagtccagacaaagaattacctacaccttggtcttggaaatccaattggttttgtctttcttcgctactgttgtctgtactgttggtatgttggcaaacaacgatttcaaggttattccaagagaagctgctgaatttggtttgggtgaaactgcttactatgttgtcttggcttgttctgctattgcttggcaaggttttttcttgggtgctattggtgtgatcttcagctcatcttctttgttctctggtatcgttattgccgttttgttgccagttactgaaattttggccgtcatcatcttcaaagaaaagttcaaggctgaaaagggtgtctctttggctttgaatttgtggggtttcgtttcttacttctacggtgatatcaagaacaacaagaccaacaacttgcaactacaattgcataagactgaagctactgctacccaaatctcttctgtttga

SEQ ID NO: 226 - protein, 352 aa, artificial
  Artificial
MKRALLIFNCLLLAVGNCGGPLIMRLYFVHGGKRVWLSSWLETGGWPMIFIPLIFSYFHRRRSAALESSESANKTKMIFMKPRLFLASAVIGIITGFDDYLYAYGVARLPVSTSALIIATQLAFTAGFAYLLVKQKFTSYSINAVVLITIGGAVLALHTSGDRPAGVSTKQYIAGFLMTLAAAALYGFVLPLVELTYKKSRQRITYTLVLEIQLVLSFFATVVCTVGMLANNDFKVIPREAAEFGLGETAYYVVLACSAIAWQGFFLGAIGVIFSSSSLFSGIVIAVLLPVTEILAVIIFKEKFKAEKGVSLALNLWGFVSYFYGDIKNNKTNNLQLQLHKTEATATQISSV

SEQ ID NO: 227 - DNA, 1083 bp, artificial
  Artificial
atggccactaacatgcacggtttggaaaacggtattcaagaaaaccagcaaaacaagcaatccgccgaatcttctaagatgtctttgtttattgctaagtggtggctgctgtttttgaactttgcttgttgtgcagttggtactattggtggtcctttgttgttgaggttgtattacttgcatggtggttccagaaaatggattccaggttggttgcaaactgttggttttccaattcatctgatccccatcttgatcctgtattctagaagatctccaggtgttaagtttttcgcttctccaaagttgttgttgtgcgctgctgttattggtgtttttactggtttggacaacttcatgtacagcttgggtttgtcttatttgccagtttctacctcctctttgttattggctactcaattggtttttaccgccttcttctcattcattatcgccagacaaaagttcaccccattctctattaacgccgttgttttgatgactttgggtgctgttatgttgggtttgagaaacaatggtgatagacctcaaggtgttacttcttctgagtacatgttaggttacatcttgactattgctgctgctggtttgttaggttttgttttgcctgttactgaagttacctacgctaaagctactcattccattacttacgccattgtcttgcaattccaattctgtactgctttgttcgctaccatcttctgttccattggtatgattgctaacaaggacttccaagccattccaagagaagctacacaatttgacttaggtgctggtaagtactacttgttgttggcttcttctgctgttgtttggcaattgatgttcttgggtattatgggtactatcttctgcacctcttctttattcgctggtattatgaacgctaccttgttgccattcactcaaattgctggtgttatcgtctacaaagaaaagtttaccggtgaaaaaggtatggctttggctttgtctttatggggttttgcttcttacttttacggtgcctacagagacaacaaaaagcaaactcaaaaagaggtcgaagagaagtaa

SEQ ID NO: 228 - protein, 360 aa, artificial
  Artificial
MATNMHGLENGIQENQQNKQSAESSKMSLFIAKWWLLFLNFACCAVGTIGGPLLLRLYYLHGGSRKWIPGWLQTVGFPIHLIPILILYSRRSPGVKFFASPKLLLCAAVIGVFTGLDNFMYSLGLSYLPVSTSSLLLATQLVFTAFFSFIIARQKFTPFSINAVVLMTLGAVMLGLRNNGDRPQGVTSSEYMLGYILTIAAAGLLGFVLPVTEVTYAKATHSITYAIVLQFQFCTALFATIFCSIGMIANKDFQAIPREATQFDLGAGKYYLLLASSAVVWQLMFLGIMGTIFCTSSLFAGIMNATLLPFTQIAGVIVYKEKFTGEKGMALALSLWGFASYFYGAYRDNKKQTQKEVEEK

SEQ ID NO: 229 - DNA, 1038 bp, artificial
  Artificial
atgagaagggccttgttggttttgaactgcgttattttgtctatcggtaattgtggtggtccattgattatgaggttgtactttattcacggtggtaagagagtttggttgtcatcttggttggaaactgctggttggccaattatctttatccctttgttgatctcctacttccacagaagatctactactgatccaactactgctaagctgttttacatgaagccatctttgtttttggctgctaccggtattggtattttgactggttttgatgattacttgtacgcttacggtgttgctagattgccagtttctacttcctctttgattatcgctactcaattggcttttaccgctggttttgcttttttgttggtcaagcaaaagttcacctcctactctattaacgccgttgttttgttgactgttggtgctggtgttttggcattgcatacttcatctgatagaccagaacacgagtctaagaaagagtacaatttgggtttcgttatgactttgggtgctgctgtcttgtatggtttgattttgccattggttgagctgacttacagaaaggctaaacaagaaatctcctacaccttggtcatggaaatccaaatgattatgtgtttgttcgctaccgttgtctgtactgttggtatgttggttaacaacgatttcaaggtcattccaagggaagccaaagaatttgaattgggtgaaactaagtactacgtcatcatggtttggtccgctattatttggcaatgttttttcttgggtgccatcggtatagttttctgtgcttcttctttggcatccggtgttgttattgctgttttgttaccagttaccgaaatcttggccgttatcttctaccaagaaaagttccaagctgaaaagggtgttgctttggctttgtctttgtggggttttttgtcttacttctacggtgaaatcaagcagtccaaaaagactaacttgacctccgaaattgaaacctccgaatcttctattccaactcagaacgtttaa

SEQ ID NO: 230 - protein, 345 aa, artificial
  Artificial
MRRALLVLNCVILSIGNCGGPLIMRLYFIHGGKRVWLSSWLETAGWPIIFIPLLISYFHRRSTTDPTTAKLFYMKPSLFLAATGIGILTGFDDYLYAYGVARLPVSTSSLIIATQLAFTAGFAFLLVKQKFTSYSINAVVLLTVGAGVLALHTSSDRPEHESKKEYNLGFVMTLGAAVLYGLILPLVELTYRKAKQEISYTLVMEIQMIMCLFATVVCTVGMLVNNDFKVIPREAKEFELGETKYYVIMVWSAIIWQCFFLGAIGIVFCASSLASGVVIAVLLPVTEILAVIFYQEKFQAEKGVALALSLWGFLSYFYGEIKQSKKTNLTSEIETSESSIPTQNV

SEQ ID NO: 231 - DNA, 1095 bp, artificial
  Artificial
atgtccttggatatcgaaagagccgaagaaactcaattcccaacttctaccaatgttgacaacaccaaattggaagatgctactccaccaaagagaaagattaactggttgttgattgccatgaacgttacctgtgttggtttgggtactattggtggtccattgatggttaggttgtatttcttgcatggtggttccaaaagatggttgtcatcttggttgcaaactgctggttttccaattttgttgggtccattgtctttcttgtacatgaagcacagagctagaggtcaaagattttttgctgaacccaagttgatgattgcctctgctgttattggtgttattatcggtttggacaatttcatgtactcccacggtttgtctgttttgccagtttctacttcttccttgttgttctctactcaattggctttcactgctttcttcgccttgattatagtcagacaaagattcaccccatactccgttaatgctgttgttttgatgactttgggttctgtcttgttgggtttgagaaaaggtggtgatagaccagctaatgtttctaatggtgagtacatggttggtttcattattaccattggtgctgctgctttgatcggttttgttttaccatgtgttgaattggcttacgctaaagcttctaaggctattacttatccagtcgtcttgcaatttcaattgggtgttacttttttcgccaccgttttctctactatcggtatgattgctcacaaggatttctccgctatttctagagaagctaaggcttacacaattggtgaagctaagtactacttggttatagtttggggtgccatcttgttccaattggtttacattggttccttgggtttagttttctgcacctcttctttgttcactggtgttgttactgctactttgttgccattgactgaaattgctgccgtcattttcttcaaagaaaagttcacaggtgagaagggtatgtctttggctttgtgtttgtggggttttatgtcttacttttacggtgcctacatcatggaaagaaagcaaagaaaggctcaagaagaggaacctaagtag

SEQ ID NO: 232 - protein, 364 aa, artificial
  Artificial
MSLDIERAEETQFPTSTNVDNTKLEDATPPKRKINWLLIAMNVTCVGLGTIGGPLMVRLYFLHGGSKRWLSSWLQTAGFPILLGPLSFLYMKHRARGQRFFAEPKLMIASAVIGVIIGLDNFMYSHGLSVLPVSTSSLLFSTQLAFTAFFALIIVRQRFTPYSVNAVVLMTLGSVLLGLRKGGDRPANVSNGEYMVGFIITIGAAALIGFVLPCVELAYAKASKAITYPVVLQFQLGVTFFATVFSTIGMIAHKDFSAISREAKAYTIGEAKYYLVIVWGAILFQLVYIGSLGLVFCTSSLFTGVVTATLLPLTEIAAVIFFKEKFTGEKGMSLALCLWGFMSYFYGAYIMERKQRKAQEEEPK

SEQ ID NO: 233 - DNA, 1110 bp, artificial
  Artificial
atggaaatcgaatcccaagccaacaaccacgaagaagaattcaacaagcaaaagaccgtccaaaagatcttcttgaagaggatgatcttgttgatgaactgcgccattttgtctattggtaatactggtggtcctctgttgttgaggttgtactttattagaggtggtaagagagtttggttgtcttgttggttggaaactggtggttggccaattatgttgattccattattgggctcctacatctacagagtgagaaagtctaaagaaaaggccaagttgttgttcatcaccccatttttgtttgttgctggtgctgttttgggtgttttgactggtgttgatgattacttgtatgcctacggtgtttctaagttgccagtttctacttccgccttgattatttctacccaattggtttttactgccggtttcgcttttttgttggtgaagcaaaagttcacctcctacactattaacgccatcgttttgttgactgttgctgcagttgttttaggtgttagagcttcttctgatagaccaaacggtgaatctaagatggaatacttcactggtttctttatgaccttgggtgcttctgcattatacggttttgttttgccaatggtcgaactgacttacaagaagtctaagaccaagatctcttacaccttggtcatcgaaatgcaaatggtcatgtctttgtttgctactgctttctgtaccatcggcatgttgattaacaaggatttccaagccattccaagagaagctaaagcttatgaattgggtgaagctaagtactacaccgtcttggtttctaatgctatcgtttggcagttttttttcttgggtgcaatcggtgttattttctccgcttcttctttgttgtccggtattatgattgcagtcttgttgccattgactgaatctttggctgttgttttctaccacgagaagttctcttcagaaaagggtattgctttggctttgtctttgtggggtttcgtttcttacttttacggtgagtacaagcagaccaagcaattgcaacaatccatcattgaatccaagaccaataccgttgttaatgcttcttctccaacctaa

SEQ ID NO: 234 - protein, 369 aa, artificial
  Artificial
MEIESQANNHEEEFNKQKTVQKIFLKRMILLMNCAILSIGNTGGPLLLRLYFIRGGKRVWLSCWLETGGWPIMLIPLLGSYIYRVRKSKEKAKLLFITPFLFVAGAVLGVLTGVDDYLYAYGVSKLPVSTSALIISTQLVFTAGFAFLLVKQKFTSYTINAIVLLTVAAVVLGVRASSDRPNGESKMEYFTGFFMTLGASALYGFVLPMVELTYKKSKTKISYTLVIEMQMVMSLFATAFCTIGMLINKDFQAIPREAKAYELGEAKYYTVLVSNAIVWQFFFLGAIGVIFSASSLLSGIMIAVLLPLTESLAVVFYHEKFSSEKGIALALSLWGFVSYFYGEYKQTKQLQQSIIESKTNTVVNASSPT

SEQ ID NO: 235 - DNA, 1122 bp, artificial
  Artificial
atgcagatggaaaccaccgacaacgaacaaagaaaagctgctgctttgaaaaggctgttgttgatcttatcctccgtcttgttgtctattggtacttgtggtggtccattgattatgaggttgtactttattcacggtggtaagagagtttggctgtcatctatgttggaaactggtggttggccagttattttggttccaattgctattgcctactaccacagaagaaaaaatcaagctccaactgatccacctaccaagttgttttttatgaagttgcctttgtttgttgcctccgctgttattggtgttttgactggtttggatgattacttgtatgcttacggtgttgctagattgccagtttctacttccgctttgattattgctgctcaattggcttttactgctttgttcgctttcatcttggtcaagcaaaagttcacctcctactctattaacgccgttgttttgttgactgttggtgctgctgttttgggtttgaatacttcttctgatagaccaaagggtgaatctaatgctcagtacatgttgggtttcgttatgacagttgcagctgctgcattatacggttttgttttgccattggtcgagctgatgtacaaaaaagccaagcaaaacattacctacgccttggttttggaaatccaaatggttatgtctctgttcgctaccattttctgtactgttggtatgttggttaacaacgacttcaaggttattccaagagaagccagaaagttcgaattgggtgaaactacttattacgtcgtcttggttgtttctgctatagtttggcaaactttcttcttgggtgctatcggtttgattttctgtgcttcatctttgttgtccggtatcgttattgcagttttgttgccagttaccgaaattttcgccgttattttctaccacgaaaagttccaagctgaaaagggtgtttctttggctttgtctttgtggggttttgtctcttacttttacggtgaaatcaagcacaacaagcaaaaaaagcaagctgatgccgtcaaagagaaagagaacaacaaagaaggttgtaccccagacgttgaaaacttgcaaactgttccaaatccataa

SEQ ID NO: 236 - protein, 373 aa, artificial
  Artificial
MQMETTDNEQRKAAALKRLLLILSSVLLSIGTCGGPLIMRLYFIHGGKRVWLSSMLETGGWPVILVPIAIAYYHRRKNQAPTDPPTKLFFMKLPLFVASAVIGVLTGLDDYLYAYGVARLPVSTSALIIAAQLAFTALFAFILVKQKFTSYSINAVVLLTVGAAVLGLNTSSDRPKGESNAQYMLGFVMTVAAAALYGFVLPLVELMYKKAKQNITYALVLEIQMVMSLFATIFCTVGMLVNNDFKVIPREARKFELGETTYYVVLVVSAIVWQTFFLGAIGLIFCASSLLSGIVIAVLLPVTEIFAVIFYHEKFQAEKGVSLALSLWGFVSYFYGEIKHNKQKKQADAVKEKENNKEGCTPDVENLQTVPNP

SEQ ID NO: 237 - DNA, 1122 bp, artificial
  Artificial
atgaacccagacttggacttgcaaacctatactgaatatccagctaagactaagaactggccattgattattttgaacaccgtcattatgaccatcggtgttattggtggtccattattgatgaggttgtactacattcatggtggtaacagaagatggttgtcctcttgtattcaaaatgctggtttccccattctgttgatcccattgacttttttgttcttccagtactctaagaccccacatcaagaaaaccatcacttgtcatcttctccattgtcctctaagccatcctcatttttgatggaacctaagctgttcctgtcctcttcttttgttggtattttgttcggcttgaacaacttcatgtacagcttgggtttgagctatattccaatctccacttcgtctttgttgttcgctactcaattggcttttgttgcttttttcgcttggttgatcgtcaagcaacaattcactgcttactccatcaactccgttgttttgatgactttgggttccattttgttgggtgttaagaacgatggtgatagaccagttggtgttacaaaagctgagtacatgttgggtttcttgttgactttaggttctgctgctttggttggtttcattttgccattggttgagctgtcttactctaaggctactagacatgttaactacaccaccatcttgcaataccaattgaacttggctttgttcagcaccatcttcaactctattggtatggttatcaacaaggacttccaagctattccaagagaagcctctgaatttgaattgggtaagactatgtactacacgatcttgattaccggtgccattatttggcaattgtctttcattggtggtttgggcgttatcttgtacacatcttctttgttctccggtatcttgacctctgttttgttgccattcactgaaattgctgccgttatcgtttacagagaatctttcactggtttgaaaggtatggctttggctttatgtttgtggggttttacctcttacttttacggtgagtacaagatgatgaagaatatgaagaccaagacctccgaaaaggttgttgacaacgatgaagaaccatgtaccgtttga

SEQ ID NO: 238 - protein, 373 aa, artificial
  Artificial
MNPDLDLQTYTEYPAKTKNWPLIILNTVIMTIGVIGGPLLMRLYYIHGGNRRWLSSCIQNAGFPILLIPLTFLFFQYSKTPHQENHHLSSSPLSSKPSSFLMEPKLFLSSSFVGILFGLNNFMYSLGLSYIPISTSSLLFATQLAFVAFFAWLIVKQQFTAYSINSVVLMTLGSILLGVKNDGDRPVGVTKAEYMLGFLLTLGSAALVGFILPLVELSYSKATRHVNYTTILQYQLNLALFSTIFNSIGMVINKDFQAIPREASEFELGKTMYYTILITGAIIWQLSFIGGLGVILYTSSLFSGILTSVLLPFTEIAAVIVYRESFTGLKGMALALCLWGFTSYFYGEYKMMKNMKTKTSEKVVDNDEEPCTV

SEQ ID NO: 239 - DNA, 1062 bp, artificial
  Artificial
atggacaaagaacaacaaagggatgctgctatgaagagagctttgttgattttcaactgcgttttgttggctattggtaattgtggtggtccattggttatgaggttgtactttgttcatggtggtaagagagtttggttgtcatcttggttggaaactggtggttggccaattatctttattccattggccatctcttacttccatagacgtagagctgctgctggtgaatctactactttgatttttatgaagcccaggttgttcttggctgctactgttattggtgttattaccggtttcgatgattacttgtatgcttacggtgttgctagattgccagtttctacttccgctttgattattgcttgtcaattggctttcactgctgttttcgcttacttgttggttaagcaaaagttcacctcctactccattaacgctgttgttttgatgacaattggtggtgctgttttggcattgcatacttcaggtgatagaccagccggtgaatcaactaaggcttatgttgctggtttcttgatgactgttgctgctgctttgttgtacggttttgttttgccattggttgagttgacttacaagaaggccaagcaacaaattacctacaccttggttttggaaatccagttggtcatgtctttgtttgctactttggtatgtaccgtcggcatgttgattaacaacgatttccaagttattcccagggaagctagagaatttggtttgggtgaaactaagtactacgttgtcttggctttttccgccattatttggcaaggttttttcttgggtgctatcggtgttattttctgctcatcttctttgttctccggtatcgttattgcagttttgttgccagttaccgaaattttggctgtcgttatcttctccgaaaagttccaagctgaaaagggtgtttctttggctttgaatttgtggggtttcgtgtcttacttttacggtgaaatcaagcacgacaagaagagaaagttggaattgcaaaatgctgaatccgcctgccaaattacttctgtttaa

SEQ ID NO: 240 - protein, 353 aa, artificial
  Artificial
MDKEQQRDAAMKRALLIFNCVLLAIGNCGGPLVMRLYFVHGGKRVWLSSWLETGGWPIIFIPLAISYFHRRRAAAGESTTLIFMKPRLFLAATVIGVITGFDDYLYAYGVARLPVSTSALIIACQLAFTAVFAYLLVKQKFTSYSINAVVLMTIGGAVLALHTSGDRPAGESTKAYVAGFLMTVAAALLYGFVLPLVELTYKKAKQQITYTLVLEIQLVMSLFATLVCTVGMLINNDFQVIPREAREFGLGETKYYVVLAFSAIIWQGFFLGAIGVIFCSSSLFSGIVIAVLLPVTEILAVVIFSEKFQAEKGVSLALNLWGFVSYFYGEIKHDKKRKLELQNAESACQITSV

SEQ ID NO: 241 - DNA, 1110 bp, artificial
  Artificial
atggacaaccataagtctgctactactaccactaatactgaacctatgactgctaaagtttctccagctgctaaaaagaccttgttgattttgaactgcatcttgttgtccgttggtatttgtggtggtccattgattatgaggttgtactttgttcatggtggtaacagagtttggctgtcctcttttttggaaactgctggttggccttttatcgttccagttttgatcgttctgttcttcatcagaagaaactctaacactaagaccaccactatctatatgaggccaagattattcttcgctactgcttttgttggtatcttgactggtttggatgattacttgtatgcttacggtttggctagattgccagtttctacttcctctttgattatcgcttctcaattgggtttcactgctttctttgcttacttgttggtcaagcaaaagttcaccccatactctattaacgccgttgttttgttgactgttggtgctggtgttttggcattgcatacttcatctgatagaccaaagggtgagtctaagaaagagtacatgttgggtttcgttatgacagttggtgcagctttgttgtacggtttcattttgccattggttgagttgacttacaacaaggctaagcaagctattacctacaccttggttttggaaatccaaatggttatgtgtttgttcgccaccattttctgtactgttggtatgatcgttaacaacgacttcaaggttattccaagagaagctactgaattcggtttgggtaagactaactactataccattttgtgtgcctctgctttgacttggcaatgttttttcttgggtgctatcggtgttattttctgcgcttcttctttgttgtctggtatcattatagctgttgctttgccagttactgaagttttggctgttgttttcttcagcgaaaagttccaagctgaaaaaggtgttgcattggttttgtctttgtggggttttgcttcttacttttacggtgagtacaagtctaccaaaaagccaaaggatatcaacgaatccactagacaaactatggaattgccacaatccgattactccagagtttga

SEQ ID NO: 242 - protein, 369 aa, artificial
  Artificial
MDNHKSATTTTNTEPMTAKVSPAAKKTLLILNCILLSVGICGGPLIMRLYFVHGGNRVWLSSFLETAGWPFIVPVLIVLFFIRRNSNTKTTTIYMRPRLFFATAFVGILTGLDDYLYAYGLARLPVSTSSLIIASQLGFTAFFAYLLVKQKFTPYSINAVVLLTVGAGVLALHTSSDRPKGESKKEYMLGFVMTVGAALLYGFILPLVELTYNKAKQAITYTLVLEIQMVMCLFATIFCTVGMIVNNDFKVIPREATEFGLGKTNYYTILCASALTWQCFFLGAIGVIFCASSLLSGIIIAVALPVTEVLAVVFFSEKFQAEKGVALVLSLWGFASYFYGEYKSTKKPKDINESTRQTMELPQSDYSRV

SEQ ID NO: 243 - DNA, 1194 bp, artificial
  Artificial
atgaagtccatcgtcgaaaacgaccagtctaatatgaaaggtggtgtcttggtttcctccaactctcatgaacatcatcatcaccaagaagaggacaacaaaaagaaaaagaagatgaagctggtcatcctgatcgttaactgcatttttttgtccgttgctcaaattaccggtcctttgttgttgagagtttactacttgcatggtggtcaaagaaagtggttgtcatcttggttgcaaactgttgcttttcccttcttgttgatcccaatttccgtttcctggttcaagtccaaatctaagtctcacgattccagatccatttccgctattgatgttaacccaactaccgacagaaagttgagatttggtggtttttcacccaagttgttcatcagctgtattttcttgggtatcatcgtcggtttggactcattcttgtatgcttatggtgtttcctacttgccagtttctacttcctctttgttgatgtctactcaattggcttttactgctgctttcgccttgttgttggttagacaaaagtttaccccatactccatcaactccgttgttttgttgactttgggtgctgttgttttggcttttcataccaatggtgataagccaatcggtgtttctaaggaccaatactttttgggtttcttcgttactttaggtgctgcagctttgtttggttttatgttgccattcatcgagctggtttacagaaaagcttgtgaagctgttacctacgatttggttatgagaatgcagttcatcatctctatggttgctactgttttctgcaccattgccatgttgattaacaaggatttccaagccatttccagagaagctaagggttttgaattaggcgaaacgaagtactacatcgtcttgatttttaccgccgtttctatgcaatgtgcagttgttggtacattgggtgttattcattgtgcctcatctttgttctctggtgttttgatgaccctgttgttgccaattcaacaaatttgcgctatcttcttcttcaacgaaaaattctctgccgagaagggtatgtctttgggtttgtctatttggggttttgcctcttacttttacggtgagtacaagcagactaagaagaaaactaatcaacacaaggccgtgccaatcaactctcaagaaattccagatgaagtctaa

SEQ ID NO: 244 - protein, 397 aa, artificial
  Artificial
MKSIVENDQSNMKGGVLVSSNSHEHHHHQEEDNKKKKKMKLVILIVNCIFLSVAQITGPLLLRVYYLHGGQRKWLSSWLQTVAFPFLLIPISVSWFKSKSKSHDSRSISAIDVNPTTDRKLRFGGFSPKLFISCIFLGIIVGLDSFLYAYGVSYLPVSTSSLLMSTQLAFTAAFALLLVRQKFTPYSINSVVLLTLGAVVLAFHTNGDKPIGVSKDQYFLGFFVTLGAAALFGFMLPFIELVYRKACEAVTYDLVMRMQFIISMVATVFCTIAMLINKDFQAISREAKGFELGETKYYIVLIFTAVSMQCAVVGTLGVIHCASSLFSGVLMTLLLPIQQICAIFFFNEKFSAEKGMSLGLSIWGFASYFYGEYKQTKKKTNQHKAVPINSQEIPDEV

SEQ ID NO: 245 - DNA, 1116 bp, artificial
  Artificial
atggccatgtccatcgaaagaattgaagaaggtgctttggaacaaaacaaccaccataacaaattgtccgatggtgactacgaagaggactctaaaaaatctttgatggctaagtggggcctgttgttgttgaactgtacttgttctgctgttggtactattggtggtcctttgttgttaaggttgtacttcttgcatggtggttccagaaaatggttatcttcttggttgcaaactgctggtttcccaattttgttgatcccattattggtcttgtacttcagagacagatctttgggtgttaagtttttcgcttctcccaagttgttgttatcctctgctgttatcggtgtcttgttgggtttagataacttcatgtactcctacggcttgtcttttttgccagtttctacttcctccttgttgatctctacccaattgattttcactgctttgttcgccttcatcatggtcagacaaaagtttactccatactccatcaactccgttgttttgatgactttgggttccatcttgctgggtttgagaaaatctggtgatagaccaccaggtgtttctacatctcaatacttgttaggcttcatcttgtctattggtgctgctgctttaggtggttttgttttgccatgtactgaagttgcttacgctaaagcttctaaggctatgacttattccttggtcttgcaataccagttctgtatgactttcttcgctactgttttctgtaccgttggtatgttggttaacaaggatttctctgctatgcaaagggaagcttctgaatatgaattgggtgctactaagtactacctggtcttggtttcttcagctgttgtttggcaattgatgttcgttggtactctgggtattatcttctgtacctcttctttgtttgccggtgttattactgctactttgttgccattgacagaaattgctgccgttatcgtttttcacgaaaagttcactggtgaaaaaggtatggctttggctttaggtatttggggtttcatctcttacttctacggttcctacagagagaacaagaagaacattcaatctccacacgaaacgaacaacacctcttctaagtaa

SEQ ID NO: 246 - protein, 371 aa, artificial
  Artificial
MAMSIERIEEGALEQNNHHNKLSDGDYEEDSKKSLMAKWGLLLLNCTCSAVGTIGGPLLLRLYFLHGGSRKWLSSWLQTAGFPILLIPLLVLYFRDRSLGVKFFASPKLLLSSAVIGVLLGLDNFMYSYGLSFLPVSTSSLLISTQLIFTALFAFIMVRQKFTPYSINSVVLMTLGSILLGLRKSGDRPPGVSTSQYLLGFILSIGAAALGGFVLPCTEVAYAKASKAMTYSLVLQYQFCMTFFATVFCTVGMLVNKDFSAMQREASEYELGATKYYLVLVSSAVVWQLMFVGTLGIIFCTSSLFAGVITATLLPLTEIAAVIVFHEKFTGEKGMALALGIWGFISYFYGSYRENKKNIQSPHETNNTSSK

SEQ ID NO: 247 - DNA, 1029 bp, artificial
  Artificial
atggaagctgctatgaagagagccttgttggttttgaactgcatcttgttgtttatcggtggttctggtggtccattattgactaggttgtactttattcatggtggctctagattgtggttctcttcttggttgcaaactggtggttttccaattttcttgctgccattgtccattgcctacatccaacatcatagaagaaatccatctccaggtaacagattctttattggtccaaggttgttcattgcctccgttattattggtattttgaccggtttggacgatttcttgatggctaatggtatggctagattgccaatttctacctccgctttgatttctgctactcaattggcttttactgctggttttgcctttttgttggtcagacaaaagttcaccgcttactctgttaatgccttggttttgttgactattggtgctgctgttttggctatgcatggttcttcagatagaccagaaggtgaatcttctaaagagtacatgttcggtttcgtcatgatgattggtgcagctgccttatatggtttcattatgccattcttggaactggtttatgctaaggctggtcaagaaattacttacgccgttgttatgcaaatccaaatggttatttgtgttttcgccactggtttctctactgttggtatggttattaacaacgacttcaaggtcattccaagagaagctagagaattcgaaatcggtgaaacgaagtactacttggttgttgtttggtcagctgttgcttggcaattttcatttttgggtgttgtcggtatcgttttctgtgcttcttctttgttgtctggtgtcatggtgtctttgttgattccagttactgaagtcttgggtgttatcttcttggacgaaaaattcagaccagaaaagggtgttgctttggctttgtctatttggggtttcatctcttacttttacggtgaagctaggaccctgaaaaaacaaaaacacgttgatcaagacaccgaaatgcaacaagtttaa

SEQ ID NO: 248 - protein, 342 aa, artificial
  Artificial
MEAAMKRALLVLNCILLFIGGSGGPLLTRLYFIHGGSRLWFSSWLQTGGFPIFLLPLSIAYIQHHRRNPSPGNRFFIGPRLFIASVIIGILTGLDDFLMANGMARLPISTSALISATQLAFTAGFAFLLVRQKFTAYSVNALVLLTIGAAVLAMHGSSDRPEGESSKEYMFGFVMMIGAAALYGFIMPFLELVYAKAGQEITYAVVMQIQMVICVFATGFSTVGMVINNDFKVIPREAREFEIGETKYYLVVVWSAVAWQFSFLGVVGIVFCASSLLSGVMVSLLIPVTEVLGVIFLDEKFRPEKGVALALSIWGFISYFYGEARTLKKQKHVDQDTEMQQV

SEQ ID NO: 249 - DNA, 1110 bp, artificial; identical to SEQ ID NO: 241
  Artificial

SEQ ID NO: 250 - protein, 369 aa, artificial; identical to SEQ ID NO: 242
  Artificial

SEQ ID NO: 251 - DNA, 1716 bp, artificial
  Artificial
atggccaccaaagaattgccattttctggtgagtatatgcatgatgaagaggctccaacaaaatgcgttggtcaaaaaaaaggtggttggactactttcccattcgttactgtttctttgttgggtttgtctattgctgttgctggttggatgactaacttgatcgtttacttgatccagaagttcaacatcaagaacattcatgccaccgaaatctacaatgttgttaacggttgtacctgcttctttccaatcgttggtgctattattgccgattcttttgtcggtaacttcttcgtcattctggtgtcctctatcttgagtttgttaggtttggttttgttgactttgaccgctaccttggattctttaagaccaagagattgcaagggtgatttggaaacttgtgaagctccatctcaattccaattggctattttgttctccgccattaccttggtttctattggttctggtggtactagattcactttggctactatgggtgctgatcaattcgataagacaaaggatcaaggcactttcttcaactggttcttcttcactttttacttggccaccgttattggtattaccgccattgtctacatcgaggataatgtttcttggggtgttggttacattttgtgcttggctattaacgctattggcttgaccattttcatttgcggtaaaaggtactacagacacattaagccatgtggttctccattcacatctttggctagagttatcgttgctaccatccgtaaaaagaagatggtcttgtcctctgaatctaaggattactactacggtagaatcgacgaaactatgttcaacgcaattattggtccaacctcctcattcagatttttgaatagagctgctatgaagaccgaaggtgatgctcaacaagaaggtaaattgactgaatcctggtctttgtgtaccgttcaacacgttgaagatttcaagtcgttgatcaagattttcccattgtggtccacctccatttttttgtctacaccaattgccatccagatgtccttgatggttttacaagctttgaccatggatagacatgttggtccacatttctctatcccatcttcatctttcttggtgttcactttgttgttcaccgctatctcattgtccattttcgataggttgttgttcccaatgtggaagaaattgactagaaggccaatgactcctttgttgagattaggtattggtcacgttttgaacatcgttggtatggctggttctgctttggttgaatctagaagattgcatgttgttaggacccataacttgactcatcaacctaattctgctgctccaatgtctgctttgtggttggttgctccattggctatagttggtgttggtgaagcttttcattttccaggtcaagttgccttgtactaccaagaatttccaacctctttgaagtctactgctaccgctatgatttccttggttattgcagttgctttctacttgtctaccgccttgattaacttgacccaaaagattactggttggctgccagataatatcaacgaaggtaggattgataacgtgttctggatgttagttatcttgggtgttatcaacttcggctactacattacttgtgccatgttgtataagtacaacaacgttgaaaacgccgaacagatttctgaaactgttactgaagcttaa

SEQ ID NO: 252 - protein, 571 aa, artificial
  Artificial
MATKELPFSGEYMHDEEAPTKCVGQKKGGWTTFPFVTVSLLGLSIAVAGWMTNLIVYLIQKFNIKNIHATEIYNVVNGCTCFFPIVGAIIADSFVGNFFVILVSSILSLLGLVLLTLTATLDSLRPRDCKGDLETCEAPSQFQLAILFSAITLVSIGSGGTRFTLATMGADQFDKTKDQGTFFNWFFFTFYLATVIGITAIVYIEDNVSWGVGYILCLAINAIGLTIFICGKRYYRHIKPCGSPFTSLARVIVATIRKKKMVLSSESKDYYYGRIDETMFNAIIGPTSSFRFLNRAAMKTEGDAQQEGKLTESWSLCTVQHVEDFKSLIKIFPLWSTSIFLSTPIAIQMSLMVLQALTMDRHVGPHFSIPSSSFLVFTLLFTAISLSIFDRLLFPMWKKLTRRPMTPLLRLGIGHVLNIVGMAGSALVESRRLHVVRTHNLTHQPNSAAPMSALWLVAPLAIVGVGEAFHFPGQVALYYQEFPTSLKSTATAMISLVIAVAFYLSTALINLTQKITGWLPDNINEGRIDNVFWMLVILGVINFGYYITCAMLYKYNNVENAEQISETVTEA

SEQ ID NO: 253 - DNA, 1047 bp, artificial
  Artificial
atgaagaaggccctgctgttgattaactgtttggttttggctattggtaactgtggtggtccattgatgatgaggttgtactttttacatggtggtaagagagtctggttctcttcttggttggaaactggtgcttggccagttattttgtttccaattgcttgcgtttacgtccacagaagaaaaactcaaccaggtgctaagttgttcttgatgaagttgcctttgtttgttgcctctgctgttattggtgttattaccggttttgacgattacttgtatgcttacggtgttgctagattgccagtttctacttcctctttgattatcgcttctcaattggcttttactgctggttttgctttcttgttggtcaagcaaaagttcacctcctactctattaacgccgtttttttgttgactattggtgctggtgttttggccttgcatacttcttcagatagaccagaaaacgagtccaacaaagaatacgttttgggctttttgatgactgttgctgcagctgtcttgtacggtttcattttgccattggttgagctgatgtacaagaaggctagacaagaattgtcttacgccttggttatggaaatccaaatggttatgtgtttgttcgctaccgttttctgtactgttggtatggttgtcaacaacgatttcaaggttatttccagagaagccagagaatttggtttgggtgaaactaactactacgtcttggctgttttgaccgctattatttggcaatgttttttcttgggtgccatcggcgttattttctgttcttcttctttgctgtccggtatcgttattgctgttttgttgccagttaccgaaattttggctgtcatcttctacaaagaaaagttccaagctgaaaagggtgtctctttggctttgtctttgtggggttttttctcttacttctacggtgaaatgaagcacgctaaaaagatgaagcctactactactgctgaaaccgaattgccacaagctcaacaagttcctattagattggaatccgcttaa

SEQ ID NO: 254 - protein, 348 aa, artificial
  Artificial
MKKALLLINCLVLAIGNCGGPLMMRLYFLHGGKRVWFSSWLETGAWPVILFPIACVYVHRRKTQPGAKLFLMKLPLFVASAVIGVITGFDDYLYAYGVARLPVSTSSLIIASQLAFTAGFAFLLVKQKFTSYSINAVFLLTIGAGVLALHTSSDRPENESNKEYVLGFLMTVAAAVLYGFILPLVELMYKKARQELSYALVMEIQMVMCLFATVFCTVGMVVNNDFKVISREAREFGLGETNYYVLAVLTAIIWQCFFLGAIGVIFCSSSLLSGIVIAVLLPVTEILAVIFYKEKFQAEKGVSLALSLWGFFSYFYGEMKHAKKMKPTTTAETELPQAQQVPIRLESA

SEQ ID NO: 255 - DNA, 1557 bp, artificial
  Artificial
atgatcaccaccttgctgctgttttctttgttcgttttgattaccgccttgtacttcgtcttgaagaagaagtttcaatactgggagaagagaaacgttccacatgttccaccagttccattattgggtaatttcgctaagtacatcctgcagaaagaattcattggtcataccgctcaagaaatctgttctaagtttccaaacgaaccagttgttggtgcttattatgctactgaaccagctttgatggttcaagatccagaattgatcaagttggttgttaccaaggacttctactttttcaacggtcacgaaatctccgaattcaaccatagagaaagattgggcaagaacttgtttgcttcttatggtgataagtggaaggtcttgagacaaaacttgactccaattttcacctcctccaagatgaagaatatgttccacttgatcgaaaagtgctcccacgattttgaagatttgttggacaaagaagcccgtaaggacaaagaggttgaaatgagatctttgattgccagattcaccatggatggtattggtaattgtgccttcggtattcatactcacactatggaacaatccgaaaacaacccattcactactattggtaacgctttcttcttccacaactggtacagatccttccaattgattttgaggactatctacccctccattttttacggtttgggttacaagttcattccaactgaagctgaagatttcttcacgaacatgttgaccgaaattttcaaggctagagattacaccccaactaacagaaacgatttcgttgacctgatgttgaagttcaagaccaaaaagactatggtcggtgactcattgcaaaacattaagaccgatgataggaagaaggtcgaattgcaagttgatgatgatttgttgattgcccaatgcgttttgtttttcactgctggttttgaaacctctgctactactttgtctttcaccttgtacgaattggccaaacatccagaagctcaaaaaagagctattgccgaagttgacgattacttgcaaagacacaacaacgaattgaagtacgaatgcttgtctgagatgccattcattgaagcttgtttcgacgaaaccttgagaatgtatccagctgcaggtttgttgttgagagaagttattcaagactacactttcccatccggtttgaaagttgaaaagggtttgagagttttcgttcccttgtatcacttgcatcataatccagcatttttcccagatcctgaagagtatagaccagaaagatttctgccagaaaacaagcacaacattagaccatatacctacatgccatttggtgatggtccaagaatctgtattggtatgagattcgctaagatgcaaatgaccgctggtattattaccgtgttgaagaagtacagattggaattggctccaggtatgaaaactaaggttgagtttaccccaaactccattatcactcaagtaaaaggtggcatcaagctgaacatgattgaaagagaaggttgggaacagaggtga

SEQ ID NO: 256 - protein, 518 aa, artificial
  Artificial
MITTLLLFSLFVLITALYFVLKKKFQYWEKRNVPHVPPVPLLGNFAKYILQKEFIGHTAQEICSKFPNEPVVGAYYATEPALMVQDPELIKLVVTKDFYFFNGHEISEFNHRERLGKNLFASYGDKWKVLRQNLTPIFTSSKMKNMFHLIEKCSHDFEDLLDKEARKDKEVEMRSLIARFTMDGIGNCAFGIHTHTMEQSENNPFTTIGNAFFFHNWYRSFQLILRTIYPSIFYGLGYKFIPTEAEDFFTNMLTEIFKARDYTPTNRNDFVDLMLKFKTKKTMVGDSLQNIKTDDRKKVELQVDDDLLIAQCVLFFTAGFETSATTLSFTLYELAKHPEAQKRAIAEVDDYLQRHNNELKYECLSEMPFIEACFDETLRMYPAAGLLLREVIQDYTFPSGLKVEKGLRVFVPLYHLHHNPAFFPDPEEYRPERFLPENKHNIRPYTYMPFGDGPRICIGMRFAKMQMTAGIITVLKKYRLELAPGMKTKVEFTPNSIITQVKGGIKLNMIEREGWEQR

SEQ ID NO: 257 - DNA, 1557 bp, artificial
  Artificial
atgatcactactttgttgttgttctctttgttcgttttgatcactgctttgtacttcgttttgaagaagaagttccaatactgggaaaagagaaacgttccacacgttccaccagttccattgttgggtaacttcgctaagtacatcttgcaaaaggaattcatcggtcacactgctcaagaaatctgttctaagttcccaaacgaaccagttgttggtgcttactacgctactgaaccagctttgatggttcaagacccagaattgatcaagttggttgttactaaggacttctacttcttcaacggtcacgaaatctctgaattcaaccacagagaaagattgggtaagaacttgttcgcttcttacggtgacaagtggaaggttttgagacaaaacttgactccaatcttcacttcttctaagatgaagaacatgttccacttgatcgaaaagtgttctcacgacttcgaagacttgttggacaaggaagctagaaaggacaaggaagttgaaatgagatctttgatcgctagattcactatggacggtatcggtaactgtgctttcggtatccacactcacactatggaacaatctgaaaacaacccattcactactatcggtaacgctttcttcttccacaactggtacagatctttccaattgatcttgagaactatctacccatctatcttctacggtttgggttacaagttcatcccaactgaagctgaagacttcttcactaacatgttgactgaaatcttcaaggctagagactacactccaactaacagaaacgacttcgttgacttgatgttgaagttcaagactaagaagactatggttggtgactctttgcaaaacatcaagactgacgacagaaagaaggttgaattgcaagttgacgacgacttgttgatcgctcaatgtgttttgttcttcactgctggtttcgaaacttctgctactactttgtctttcactttgtacgaattggctaagcacccagaagctcaaaagagagctatcgctgaagttgacgactacttgcaaagacacaacaacgaattgaagtacgaatgtttgtctgaaatgccattcatcgaagcttgtttcgacgaaactttgagaatgtacccagctgctggtttgttgttgagagaagttatccaagactacactttcccatctggtttgaaggttgaaaagggtttgagagttttcgttccattgtaccacttgcaccacaacccagctttcttcccagacccagaagaatacagaccagaaagattcttgccagaaaacaagcacaacatcagaccatacacttacatgccattcggtgacggtccaagaatctgtatcggtatgagattcgctaagatgcaaatgactgctggtatcatcactgttttgaagaagtacagattggaattggctccaggtatgaagactaaggttgaattcactccaaactctatcatcactcaagttaagggtggtatcaagttgaacatgatcgaaagagaaggttgggaacaaagataa

SEQ ID NO: 258 - protein, 518 aa, artificial; identical to SEQ ID NO: 256
  Artificial

SEQ ID NO: 259 - DNA, 2064 bp, artificial
  Artificial
atgtccgattcagcccaagatgtactgaaagatgcagctacgggggcagcagctgcagctgccgccggaggaagtctattctctaccttcgacataattgtgcttgttattttactgggcggtacgatatggtggctttacaactcaaaaaaagagaacaaaaaggatgaaattctattgagtaaatactctatacaggctgcaggtagcattcaggttacggagaacagctttataaataagctaaagtcctcagggcgtagcctggtcgtgttttacgggtctcaaacgggaaccggggaggagttcgcagggaggcttgccaaagagggaattaggtataagatgaaaggaatggtagctgatcctgaggaatgtgatatggaggagttgatgaaactacaggacatcccaaacagcttagctgtattttgcatggcaacatatggtgagggagacccaacggataattctatggagttttatgaatggctgaagaacggtgagcccgatttaacggggctaaactacgcagtgtttgggctggggaacaagacgtacgaacattataacgccgtggcgatatacttggacaaaagattggaagaacttggcgcaacccgtgtatacgaactgggattgggggatgacgatgccaatattgaagacgactttatcacatggaaagacaagttctggcccgctgtatgcgaaaagtttaatattgagtccacgggcgaagaggaattaattcgtcaatttagacttgtcacgcacgcgccaggcgacatccaacccaacaacgtttttacgggagaaattgcgcgtctacatagtttacaagtgcagcgtcccccatacgacgccaaaaatccgtttttggcacagataacggtcaatcgtgagctacataagggcggagacaggtcttgtattcatgtcgagttggacatatcagacagcaagatgcgttacgaagctggagaccatgtcgccgtgtatcccatcaatgacacaaacctggtggagaggttgggtcagttgacaggagccaaccttgatgaaatcttcagtttgataaacactgatcaagagagttcaaagaagcacccctttccttgtccaacgtcatatcgtacggcattgagccattacgtcgagataactgccttgccgaggacgcatatccttagggagttagtagaatattgcagtgatgaggaagataagaagaaactgatgttgatggctaccaactcacaggaaggcaaagcgctgtaccaaagctttattgtggacgcatgtagaaacatagtacatatccttgaggatatcccgagttgtaagccgcccttggaccatctttgcgagttgcttccgcgtttgcaaccaaggtactatagtatcagcagtagtccgaaaatgtatccagaaacagttcatattacggcggtaattgtgaaatacaagacccccacggggagggtaaataagggtgtgacaactacctggttagcggaaaataagcccgagcccgggaagcccctacctagggtccctgtttatatcagaaaaagccagtttcgtttgccgttgcagacacagacgcccattataatggtgggaccgggtactggtctggcaccttttagagggttccttcaggaaagagcatttgcaagagctaacggcaaggaggtaggagagagtgtgttatacttcggctgcagacacagagatcaagactacatctaccaggatgaactagaaaagtatgagcaaaacggggacgttaaactaaacttagccttctcacgtgatcagaaagaaaaagtctatgttacacatttacttgagaaggatatggacttactgtgggatgtaatcggcaaccgtaacggacacttctatatttgcggtgacgcaaaaaatatggcagtggacgtgagaaatattgtactaaaggcaatacaagagaagggaggaagaacagagtctgaggcggtacagtttattaaaaagctggagtctatgaagaaatacagcgccgacgtctggtcataa

SEQ ID NO: 260 - protein, 687 aa, artificial; identical to SEQ ID NO: 159
  Artificial

1. A method for producing an oripavine glycoside and/or nororipavine glycoside comprising providing (i) a oripavine acceptor and/or nororipavine acceptor, (ii) a glycosyl donor, and (iii) a glycosyl transferase (UGT), and contacting the oripavine acceptor and/or nororipavine acceptor, the glycosyl donor, and the UGT at conditions allowing the UGT to transfer a glycosyl moiety from the glycosyl donor to the oripavine acceptor and/or nororipavine acceptor and thereby produce the oripavine glycoside and/or nororipavine glycoside.

2. The method of claim 1, wherein the glycosyl donor is a NDP-glycoside.

3. The method of claim 2, wherein the nucleoside of the nucleotide glycoside is Uridine.

4. The method of claim 3, wherein the glycosyl donor is UDP-D-glucose (UDP-Glc) or UDP-N-acetyl-D-glucosamine (UDP-GlcNAc).

5. The method of claim 1, wherein the UGT is an aglycone O-UGT.

6. The method of claim 5, wherein the UGT is an aglycone 0-glucosyltransferase.

7. The method of claim 1, wherein the UGT is derived from a plant.

8. The method of claim 7, wherein the plant is selected from the genera of Quercus, optionally Quercus suber.

9. The method of any preceding claim 1, wherein the UGT is a subfamily 71 UGT (71-UGT), a subfamily 72 UGT (72-UGT) and/or a subfamily 73 UGT (73-UGT).

10. The method of claim 9, wherein the UGT comprise an amino acid sequence which has at least 60%, such as at least 70%, such at least 75%, such as at least 80%, such as at least 90%, such as at least 95%, such as at least 99%, such as 100% identity to a UGT comprised in anyone of SEQ ID NO: 61, 62, 63, 64, 65, 66, 67, 68, 69, 70, 71, 72, 73, 74, 75, 76, 77, 78, 79, 80, 81, 82, 83, 84, 85, 86, 87, 88, 89, 90, 91, 92, 93, 94, 95, 96, 97, 98, 99, 100, 101, 102, 103, 104, 105, 106, 107, 108, 109, 110, 111, 112, 113, 114, 115, 116, 117, 118, 119, 120, 170, 172, 174, 176, 178, 180, 182, 184, 186, 188, 190, 192, 194, 196, 198, 200, 202, 204, 206, 208, 210, 212, 214, 216, 218, 220, or 222.

11. The method of claim 10, wherein the UGT comprise an amino acid sequence which has at least 60%, such as at least 70%, such at least 75%, such as at least 80%, such as at least 90%, such as at least 95%, such as at least 99%, such as 100% identity to a UGT comprised in anyone of SEQ ID NO: 63, 77, 81, 82, 83, 84, 86, 87, 92, 93, 94, 95, 96, 97, 98, 99, 100, 101, 102, 103, 104, 105, 107, 108, 111, 112, 115, 116, 117, 170, 172, 174, 176, 178, 180, 182, 184, 186, 188, 190, 192, 194, 196, 198, 200, 202, 204, 206, 208, 210, 212, 214, 216, 218, 220, or 222.

12. The method of claim 11, wherein the UGT comprise an amino acid sequence which has at least 60%, such as at least 70%, such at least 75%, such as at least 80%, such as at least 90%, such as at least 95%, such as at least 99%, such as 100% identity to a UGT comprised in anyone of SEQ ID NO: 63, 83, 84, 86, 87, 101, 102, 103, 104, 105, 115, 170, 172, 174, 176, 178, 180, 182, 184, 186, 188, 190, 192, 194, 196, 198, 200, 202, 204, 206, 208, 210, 212, 214, 216, 218, 220, or 222.

13. The method of claim 9, wherein the UGT has a specificity towards nororipavine which at least 50% higher, such as at least 75% higher, such as at least 90% higher than the specificity towards oripavine, when performing the glycosylation in aqueous tris buffer at pH 7,4 at 30° C. and at 0.5 mM substrate level.

14. The method of claim 13, wherein the UGT comprise an amino acid sequence which has at least 60%, such as at least 70%, such at least 75%, such as at least 80%, such as at least 90%, such as at least 95%, such as at least 99%, such as 100% identity to a UGT comprised in anyone of SEQ ID NO: 77, 81, 82, 92, 93, 94, 95, 96, 97, 98, 99, 100, 102, 103, 104, 105, 107, 108, 116, or 117.

15. The method of claim 14, wherein the UGT comprise an amino acid sequence which has at least 60%, such as at least 70%, such at least 75%, such as at least 80%, such as at least 90%, such as at least 95%, such as at least 99%, such as 100% identity to a UGT comprised in anyone of SEQ ID NO: 102, 103, 104, or 105.

16. The method of claim 9, wherein the UGT has a specificity towards oripavine which at least 50% higher, such as at least 75% higher, such as at least 90% higher than the specificity towards nororipavine, when performing the glycosylation in aqueous tris buffer at pH 7,4 at 30° C. and at 0.5 mM substrate level.

17. The method of claim 16, wherein the UGT comprise an amino acid sequence which has at least 60%, such as at least 70%, such at least 75%, such as at least 80%, such as at least 90%, such as at least 95%, such as at least 99%, such as 100% identity to a UGT comprised in anyone of SEQ ID NO: 111, 112, or 115.

18. The method of claim 17, wherein the UGT comprise an amino acid sequence which has at least 60%, such as at least 70%, such at least 75%, such as at least 80%, such as at least 90%, such as at least 95%, such as at least 99%, such as 100% identity to a UGT comprised in SEQ ID NO: 115.

19. The method of claim 9, wherein the subfamily 71-UGT comprise an amino acid sequence which has at least 60%, such as at least 70%, such at least 75%, such as at least 80%, such as at least 90%, such as at least 95%, such as at least 99%, such as 100% identity to a 71-UGT comprised in anyone of SEQ ID NO: 61, 62, 63, 64, 65, 66, 67, 68, 69, 70, 71, 72, 73, 74, 75, 76, 77, 78, 79, 80, 81, 82, 83, 84, 85, 86, 87, 88, 89, or 90.

20. The method of claim 19, wherein the subfamily 71-UGT comprise an amino acid sequence which has at least 60%, such as at least 70%, such at least 75%, such as at least 80%, such as at least 90%, such as at least 95%, such as at least 99%, such as 100% identity to a 71-UGT comprised in anyone of SEQ ID NO: 63, 77, 81, 82, 83, 84, 86, or 87.

21. The method of claim 9, wherein the subfamily 72-UGT comprise an amino acid sequence which has at least 60%, such as at least 70%, such at least 75%, such as at least 80%, such as at least 90%, such as at least 95%, such as at least 99%, such as 100% identity to a 72-UGT comprised in anyone of SEQ ID NO: 91, 92, 93, 94, 95, 96, 97, 98, 99, 100, 101, 102, 103, 104, 105, 106, 107, or 108.

22. The method of claim 21, wherein the subfamily 72-UGT comprise an amino acid sequence which has at least 60%, such as at least 70%, such at least 75%, such as at least 80%, such as at least 90%, such as at least 95%, such as at least 99%, such as 100% identity to a 72-UGT comprised in anyone of SEQ ID NO: 92, 93, 94, 95, 96, 97, 98, 99, 100, 101, 102, 103, 104, 105, 107, or 108.

23. The method of claim 9, wherein the subfamily 73-UGT comprise an amino acid sequence which has at least 60%, such as at least 70%, such at least 75%, such as at least 80%, such as at least 90%, such as at least 95%, such as at least 99%, such as 100% identity to a 73-UGT comprised in anyone of SEQ ID NO: 109, 110, 111, 112, 113, 114, 115, 116, 117, 118, 119, 120.

24. The method of claim 23, wherein the subfamily 73-UGT comprise an amino acid sequence which has at least 60%, such as at least 70%, such at least 75%, such as at least 80%, such as at least 90%, such as at least 95%, such as at least 99%, such as 100% identity to a 73-UGT comprised in anyone of SEQ ID NO: 111, 112, 115, 116, or 117.

25. The method of claim 9, further comprising one or more steps selected from
a) converting thebaine to oripavine;
b) converting thebaine to northebaine;
c) converting oripavine to nororipavine; and/or
d) converting northebaine to nororipavine;
by contacting the thebaine, northebaine and/or oripavine with one or more 0-demethylases and/or N-demethylases.

26. The method of claim 25, wherein the demethylase has at least 60%, such as at least 70%, such at least 75%, such as at least 80%, such as at least 90%, such as at least 95%, such as at least 99%, such as 100% identity to a to a demethylase comprised in any one of SEQ ID NO: 153 155, 157, 256, or 258.

27. The method of claim 25, further comprising the step of reducing the demethylase with a demethylase-CPR.

28. The method of claim 27, wherein the demethylase-CPR has at least 60%, such as at least 70%, such at least 75%, such as at least 80%, such as at least 90%, such as at least 95%, such as at least 99%, such as 100% identity to a to a demethylase-CPR comprised in any one of SEQ ID NO: 159, 161, or 260.

29. The method of claim 25, wherein the conversion rate (unit mass-1 time-1) of the demethylase is increased compared to the conversion rate absent any UGT's converting the oripavine and/or nororipavine and the glycosyl donor into the corresponding oripavine glycoside and/or nororipavine glycoside.

30. A method for producing an oripavine aglycone and/or nororipavine aglycone comprising providing (i) a oripavine glycoside and/or nororipavine glycoside and (ii) a glycosidase and contacting the oripavine glycoside and/or nororipavine glycoside and (ii) with the glycosidase at conditions allowing the glycosidase to catalyze separation of a glycosyl moiety from the oripavine glycoside and/or nororipavine glycoside and thereby produce the oripavine aglycone and/or nororipavine aglycone.

31. The method of claim 30, wherein the glycosidase is a β-glycosidase.

32. The method of claim 31, wherein the β-glycosidase is a β-glucosidase.

33. The method of claim 30, further comprising the steps of the method of claims 1 to 26 for providing the oripavine glycoside and/or nororipavine glycoside.

34. The method of claim 30, wherein the contacting of the oripavine acceptor and/or nororipavine acceptor, the glycosyl donor, and the UGT or the oripavine glycoside and/or nororipavine-glycoside, and the glycosidase is made in a buffered aqueous solution at a pH from 4,0 to 8,5 and at a temperature of 10 to 85° C.

35. A glycoside comprising an oripavine aglycone and/or nororipavine aglycone and a glycosyl group.

36. The glycoside of claim 35, wherein the glycosyl group is glucose.

37. The glycoside of claim 35, wherein the glycoside is an oripavine-O-glycoside or a nororipavine-O-glycoside.

38. The glycoside of claim 37, wherein the glucoside is an oripavine-O-glucoside or a nororipavine-O-glucoside.

39. A microbial host cell genetically modified to produce an oripavine glycoside and/or nororipavine glycoside in the presence of a glycosyl donor, wherein the host cell expresses one or more heterologous genes encoding one or more UGT's, which in the presence of a glycosyl donor and a oripavine acceptor and/or nororipavine acceptor, transfers a glycosyl moiety from the glycosyl donor to the oripavine acceptor and/or nororipavine acceptor and thereby produce the oripavine glycoside and/or nororipavine glycoside.

40. The host cell of claim 39, further comprising genes of a pathway producing the oripavine acceptor and/or nororipavine acceptor.

41. The host cell of claim 39, wherein the glycosyl donor is an NDP-glycoside.

42. The host cell of claim 41, wherein the nucleoside of the nucleotide glycoside is Uridine.

43. The host cell of claim 42, wherein the glycosyl donor is UDP-D-glucose (UDP-Glc) or UDP-N-acetyl-D-glucosamine (UDP-GlcNAc).

44. The host cell of claims 39 to 43, wherein the UGT is an aglycone O-UGT.

45. The host cell of claim 44, wherein the UGT is an aglycone 0-glucosyltransferase.

46. The host cell of claim 39 wherein the UGT is derived from a plant or a fungus.

47. The host cell of claim 46, wherein the plant is selected from the genera of Quercus, optionally Quercus suber.

48. The host cell of claim 39, wherein the UGT is a family 71 UGT (71-UGT), a family 72 UGT (72-UGT) and/or a family 73 UGT (73-UGT).

49. The host cell of claim 48, wherein the UGT comprise an amino acid sequence which has at least 60%, such as at least 70%, such at least 75%, such as at least 80%, such as at least 90%, such as at least 95%, such as at least 99%, such as 100% identity to a UGT comprised in anyone of SEQ ID NO: 61, 62, 63, 64, 65, 66, 67, 68, 69, 70, 71, 72, 73, 74, 75, 76, 77, 78, 79, 80, 81, 82, 83, 84, 85, 86, 87, 88, 89, 90, 91, 92, 93, 94, 95, 96, 97, 98, 99, 100, 101, 102, 103, 104, 105, 106, 107, 108, 109, 110, 111, 112, 113, 114, 115, 116, 117, 118, 119, 120, 170, 172, 174, 176, 178, 180, 182, 184, 186, 188, 190, 192, 194, 196, 198, 200, 202, 204, 206, 208, 210, 212, 214, 216, 218, 220, or 222.

50. The host cell of claim 49, wherein the UGT comprise an amino acid sequence which has at least 60%, such as at least 70%, such at least 75%, such as at least 80%, such as at least 90%, such as at least 95%, such as at least 99%, such as 100% identity to a UGT comprised in anyone of SEQ ID NO: 63, 77, 81, 82, 83, 84, 86, 87, 92, 93, 94, 95, 96, 97, 98, 99, 100, 101, 102, 103, 104, 105, 107, 108, 111, 112, 115, 116, 117, 170, 172, 174, 176, 178, 180, 182, 184, 186, 188, 190, 192, 194, 196, 198, 200, 202, 204, 206, 208, 210, 212, 214, 216, 218, 220, or 222.

51. The host cell of claim 50, wherein the UGT comprise an amino acid sequence which has at least 60%, such as at least 70%, such at least 75%, such as at least 80%, such as at least 90%, such as at least 95%, such as at least 99%, such as 100% identity to a UGT comprised in anyone of SEQ ID NO: 63, 83, 84, 86, 87, 101, 102, 103, 104, 105, 115, 170, 172, 174, 176, 178, 180, 182, 184, 186, 188, 190, 192, 194, 196, 198, 200, 202, 204, 206, 208, 210, 212, 214, 216, 218, 220, or 222.

52. The host cell of claim 48, wherein the UGT has a specificity towards nororipavine which at least 50% higher, such as at least 75% higher, such as at least 90% higher than the specificity towards oripavine, when performing the glycosylation in aqueous tris buffer at pH 7,4 at 30° C. and at 0.5 mM substrate level.

53. The host cell of claim 52, wherein the UGT comprise an amino acid sequence which has at least 60%, such as at least 70%, such at least 75%, such as at least 80%, such as at least 90%, such as at least 95%, such as at least 99%, such as 100% identity to a UGT comprised in anyone of SEQ ID NO: 77, 81, 82, 92, 93, 94, 95, 96, 97, 98, 99, 100, 102, 103, 104, 105, 107, 108, 116, or 117.

54. The host cell of claim 53, wherein the UGT comprise an amino acid sequence which has at least 60%, such as at least 70%, such at least 75%, such as at least 80%, such as at least 90%, such as at least 95%, such as at least 99%, such as 100% identity to a UGT comprised in anyone of SEQ ID NO: 102, 103, 104, or 105.

55. The host cell of claim 48, wherein the UGT has a specificity towards oripavine which at least 50% higher, such as at least 75% higher, such as at least 90% higher than the specificity towards nororipavine, when performing the glycosylation in aqueous tris buffer at pH 7,4 at 30° C. and at 0.5 mM substrate level.

56. The host cell of claim 55, wherein the UGT comprise an amino acid sequence which has at least 60%, such as at least 70%, such at least 75%, such as at least 80%, such as at least 90%, such as at least 95%, such as at least 99%, such as 100% identity to a UGT comprised in anyone of SEQ ID NO: 111, 112, or 115.

57. The host cell of claim 56, wherein the UGT comprise an amino acid sequence which has at least 60%, such as at least 70%, such at least 75%, such as at least 80%, such as at least 90%, such as at least 95%, such as at least 99%, such as 100% identity to a UGT comprised in SEQ ID NO: 115.

58. The host cell of claim 48, wherein the 71-UGT comprise an amino acid sequence which has at least 60%, such as at least 70%, such at least 75%, such as at least 80%, such as at least 90%, such as at least 95%, such as at least 99%, such as 100% identity to a 71-UGT comprised in anyone of SEQ ID NO: 61, 62, 63, 64, 65, 66, 67, 68, 69, 70, 71, 72, 73, 74, 75, 76, 77, 78, 79, 80, 81, 82, 83, 84, 85, 86, 87, 88, 89, or 90.

59. The host cell of claim 58, wherein the 71-UGT comprise an amino acid sequence which has at least 60%, such as at least 70%, such at least 75%, such as at least 80%, such as at least 90%, such as at least 95%, such as at least 99%, such as 100% identity to a 71-UGT comprised in anyone of SEQ ID NO: 63, 77, 81, 82, 83, 84, 86, or 87.

60. The host cell of claim 48, wherein the 72-UGT comprise an amino acid sequence which has at least 60%, such as at least 70%, such at least 75%, such as at least 80%, such as at least 90%, such as at least 95%, such as at least 99%, such as 100% identity to a 72-UGT comprised in anyone of SEQ ID NO: 91, 92, 93, 94, 95, 96, 97, 98, 99, 100, 101, 102, 103, 104, 105, 106, 107, or 108.

61. The host cell of claim 60, wherein the 72-UGT comprise an amino acid sequence which has at least 60%, such as at least 70%, such at least 75%, such as at least 80%, such as at least 90%, such as at least 95%, such as at least 99%, such as 100% identity to a 72-UGT comprised in anyone of SEQ ID NO: 92, 93, 94, 95, 96, 97, 98, 99, 100, 101, 102, 103, 104, 105, 107, or 108.

62. The host cell of claim 48, wherein the 73-UGT comprise an amino acid sequence which has at least 60%, such as at least 70%, such at least 75%, such as at least 80%, such as at least 90%, such as at least 95%, such as at least 99%, such as 100% identity to a 73-UGT comprised in anyone of SEQ ID NO: 109, 110, 111, 112, 113, 114, 115, 116, 117, 118, 119, 120.

63. The host cell of claim 62, wherein the 73-UGT comprise an amino acid sequence which has at least 60%, such as at least 70%, such at least 75%, such as at least 80%, such as at least 90%, such as at least 95%, such as at least 99%, such as 100% identity to a 73-UGT comprised in anyone of SEQ ID NO: 111, 112, 115, 116, or 117.

64. The host cell of claim 39, further comprising an operative biosynthetic pathway capable of producing the oripavine acceptor and/or nororipavine acceptor, wherein the pathway comprises one or more polypeptides selected from:
a) a 3-deoxy-D-arabino-2-heptulosonic acid 7-phosphate synthase (DAHP synthase) converting PEP and E4P into DAHP;
b) a 5-enolpyruvylshikimate-3-phosphate (EPSP) synthase (aro1) converting 3-phosphoshikimate and PEP into EPSP;
c) an aro1 polypeptide converting DHAP and PEP into EPSP;
d) a chorismate synthase converting EPSP into Chorismate;
e) a chorismate mutase converting Chorismate into prephenate;
f) a prephenate dehydrogenase (Tyr1) converting prephenate into 4-HPP;
g) an aromatic aminotransferase converting 4-HPP into L-Tyrosine;
h) a tyrosine hydroxylase (TH) converting L-tyrosine into L-dopa
i) a TH-CPR capable of reducing the TH of h);
j) a L-dopa decarboxylase (DODC) converting L-dopa into dopamine;
k) a Tyrosine decarboxylase (TYDC) converting L-dopa into dopamine;
l) a hydroxyphenylpyruvate decarboxylase (HPPDC) converting 4-HPP into 4-HPPA;
m) a monoamine oxidase converting dopamine into 3,4-DHPAA;
n) a norcoclaurine synthase (NCS) converting Dopamine and 4-HPAA into (S)-norcoclaurine;
o) a 6-O-methyltransferase (6-OMT) converting (S)-norcoclaurine into (S)-Coclaurine and/or norlaudanosoline into (S)-3′-Hydroxy-coclaurine;
p) a coclaurine-N-methyltransferase (CNMT) converting (S)-Coclaurine into (S)—N-Methylcoclaurine and/or (S)-3′-hydroxycoclaurine into (S)-3′-hydroxy-N-methyl-coclaurine;
q) a N-methyl-coclaurine hydroxylase (NMCH) converting (S)-Coclaurine into (S)-3′-hydroxycoclaurine and/or (S)—N-Methylcoclaurine into (S)-3′-Hydroxy-N-Methylcoclaurine;
r) a 3′-hydroxy-N-methyl-(S)-coclaurine 4′-O-methyltransferase (4′-OMT) converting (S)-3′-Hydroxy-N-Methylcoclaurine into (S)-Reticuline;
s) a 1,2-dehydroreticuline synthase-1,2-dehydroreticuline reductase (DRS-DRR) converting (S)-Reticuline into (R)-reticuline;
t) a salutaridine synthase (SAS) converting (R)-reticuline into Salutaridine;
u) a salutaridine reductase (SAR) converting Salutaridine to Salutaridinol;
v) a salutaridinol 7-O-acetyltransferase (SAT) converting Salutaridinol into 7-O-acetylsalutaridinol;
w) a thebaine synthase (THS) converting 7-O-acetylsalutaridinol or 7-O-acetylsalutaridinol acetate into thebaine;
x) a demethylase converting thebaine into oripavine, thebaine into northebaine, oripavine into nororipavine and/or northebaine into nororipavine; and/or
y) a demethylase-CPR capable of reducing the demethylase of x).

65. The host cell of claim 64, wherein the corresponding:
a) DAHP synthase has at least 70% identity to the DAHP synthase comprised in SEQ ID NO: 121
b) chorismate mutase has at least 70% identity to the chorismate synthase comprised in SEQ ID NO: 123;
c) prephenate dehydrogenase (Tyr1) has at least 70% identity to the DAHP synthase comprised in SEQ ID NO: 125
d) Tyrosine Hydroxylase (TH) has at least 70% identity to the TH comprised in SEQ ID NO: 127
e) TH-CPR has at least 70% identity to the TH-CPR comprised in SEQ ID NO: 129;
f) DODC has at least 70% identity to the DODC comprised in SEQ ID NO: 131;
g) Norcoclaurine synthase (NCS) has at least 70% identity to the NCS comprised in SEQ ID NO: 133;
h) 6-OMT has at least 70% identity to the 6-OMT comprised in SEQ ID NO: 135;
i) CNMT has at least 70% identity to the CNMT comprised in SEQ ID NO: 137;
j) NMCH has at least 70% identity to the NMCH comprised in SEQ ID NO: 139;
k) 4′-OMT has at least 70% identity to the 4′-OMT comprised in SEQ ID NO: 141;
l) DRS-DRR has at least 70% identity to the VRS_DDR comprised in SEQ ID NO:143;
m) SAS has at least 70% identity to the SAS comprised in SEQ ID NO: 145;
n) SAT has at least 70% identity to the SAR comprised in SEQ ID NO: 147;
o) SAR has at least 70% identity to the SAT comprised in SEQ ID NO: 149;
p) THS has at least 70% identity to the THS comprised in SEQ ID NO: 151;
q) Demethylase has at least 70% identity to the demethylase comprised in anyone of SEQ ID NO: 153, 155, 157, 256, or 258; and
r) Demethylase-CPR has at least 70% identity to the demethylase-CPR comprised in anyone of SEQ ID NO: 159, 161, or 260.

66. The host cell of claim 39, further comprising a demethylase converting thebaine into oripavine, thebaine into northebaine, oripavine into nororipavine and/or northebaine into nororipavine; optionally a demethylase which has at least 70% identity to a demethylase comprised in SEQ ID NO: 153, 155, 157, 256, or 258.

67. The host cell of claim 64, wherein the conversion rate (unit mass-1 time-1) of one or more pathway enzymes is increased compared to the conversion rate absent any UGT's converting the oripavine and/or nororipavine and the glycosyl donor into the corresponding oripavine glycoside and/or nororipavine glycoside.

68. The host cell of claim 39, further comprising one or more transporter proteins facilitating transport of one or more metabolites of the pathway.

69. The host cell of claim 68, wherein the transporter protein is a permease.

70. The host cell of claim 69, wherein the permease is a Purine Uptake Permease (PUP).

71. The host cell of claim 68, wherein the transporter protein has at least 70% identity to the transporter comprised in SEQ ID NO: 224, 226, 228, 230, 232, 234, 236, 238, 240, 242, 244, 246, 248, 250, 252, or 254.

72. The host cell of claim 39 expressing one or more genes selected from the group of:
a) one or more polynucleotides which is at least 70% identical to the DAHP synthase encoding polynucleotide comprised in SEQ ID NO: 122 or genomic DNA thereof;
b) one or more polynucleotides which is at least 70% identical to the chorismate mutase encoding polynucleotide comprised in SEQ ID NO: 124 or genomic DNA thereof;
c) one or more polynucleotides which is at least 70% identical to the prephenate dehydrogenase encoding polynucleotide comprised in SEQ ID NO: 126 or genomic DNA thereof;
d) one or more polynucleotides which is at least 70% identical to the TH encoding polynucleotide comprised in SEQ ID NO: 128 or genomic DNA thereof;
e) one or more polynucleotides which is at least 70% identical to the TH-CPR encoding polynucleotide comprised in SEQ ID NO: 130 or genomic DNA thereof;
f) one or more polynucleotides which is at least 70% identical to the DODC encoding polynucleotide comprised in SEQ ID NO: 132 genomic DNA thereof;
g) one or more polynucleotides which is at least 70% identical to the NCS encoding polynucleotide comprised in SEQ ID NO: 134 or genomic DNA thereof;
h) one or more polynucleotides which is at least 70% identical to the 6-OMT encoding polynucleotide comprised in SEQ ID NO: 136 or genomic DNA thereof;
i) one or more polynucleotides which is at least 70% identical to the CNMT encoding polynucleotide comprised in SEQ ID NO: 138 or genomic DNA thereof;
j) one or more polynucleotides which is at least 70% identical to the NMCH encoding polynucleotide comprised in SEQ ID NO: 140 or genomic DNA thereof;
k) one or more polynucleotides which is at least 70% identical to the 4′-OMT encoding polynucleotide comprised in SEQ ID NO: 142 or genomic DNA thereof;
l) one or more polynucleotides which is at least 70% identical to the DRS-DRR encoding polynucleotide comprised in SEQ ID NO: 144 or genomic DNA thereof;
m) one or more polynucleotides which is at least 70% identical to the SAS encoding polynucleotide comprised in SEQ ID NO: 146 or genomic DNA thereof;
n) one or more polynucleotides which is at least 70% identical to the SAT encoding polynucleotide comprised in SEQ ID NO: 148 or genomic DNA thereof;
o) one or more polynucleotides which is at least 70% identical to the SAR encoding polynucleotide comprised in SEQ ID NO: 150 or genomic DNA thereof;
p) one or more polynucleotides which is at least 70% identical to the THS encoding polynucleotide comprised in SEQ ID NO: 152 or genomic DNA thereof;
q) one or more polynucleotides which is at least 70% identical to the demethylase encoding polynucleotide comprised in anyone of SEQ ID NO: 154, 156, 158, 255, or 257 or genomic DNA thereof;
r) one or more polynucleotides which is at least 70% identical to the demethylase-CPR encoding polynucleotide comprised in any one of SEQ ID NO: 160, 162, or 259 or genomic DNA thereof; and
s) one or more polynucleotides which is at least 70% identical to the transporter encoding polynucleotide comprised in SEQ ID NO: 223, 225, 227, 229, 231, 233, 235, 237, 239, 241, 243, 245, 247, 249, 251, or 253 or genomic DNA thereof.

73. The host cell of claims 39 to 72, wherein the cell is eukaryote and selected from the group consisting of mammalian, insect, plant, or fungal cells.

74. The host cell of claim 73, wherein the cell is a plant cell of the genus Physcomitrella or Papaver or Nicotiana.

75. The host cell of claim 74, wherein the cell is a plant cell of the species Papaver soniferum or Nicotiana benthamiana.

76. The host cell of claim 73, wherein the cell is a fungal cell selected from the phylas consisting of Ascomycota, Basidiomycota, Neocallimastigomycota, Glomeromycota, Blastocladiomycota, Chytridiomycota, Zygomycota, Oomycota and Microsporidia.

77. The host cell of claim 76, wherein the fungal cell is a yeast selected from the group consisting of ascosporogenous yeast (Endomycetales), basidiosporogenous yeast, and Fungi Imperfecti yeast (Blastomycetes).

78. The host cell of claim 77, wherein the yeast cell is selected from the genera consisting of Saccharomyces, Kluveromyces, Candida, Pichia, Debaromyces, Hansenula, Yarrowia, Zygosaccharomyces, and Schizosaccharomyces.

79. The host cell of claim 78, wherein the yeast cell is selected from the species consisting of Kluyveromyces lactis, Saccharomyces carlsbergensis, Saccharomyces cerevisiae, Saccharomyces diastaticus, Saccharomyces douglasii, Saccharomyces kluyveri, Saccharomyces norbensis, Saccharomyces oviformis, and Yarrowia lipolytica.

80. The host cell of claim 77, wherein the fungal cell is a filamentous fungus.

81. The host cell of claim 80, wherein the filamentous fungal cell is selected from the phylas consisting of Ascomycota, Eumycota and Oomycota.

82. The host cell of claim 81, wherein the filamentous fungal cell is selected from the genera consisting of Acremonium, Aspergillus, Aureobasidium, Bjerkandera, Ceriporiopsis, Chrysosporium, Coprinus, Corio/us, Cryptococcus, Filibasidium, Fusarium, Humicola, Magnaporthe, Mucor, Myceliophthora, Neocallimastix, Neurospora, Paecilomyces, Penicillium, Phanerochaete, Phlebia, Piromyces, Pleurotus, Schizophyllum, Talaromyces, Thermoascus, Thielavia, Tolypocladium, Trametes, and Trichoderma

83. The host cell of claim 82, wherein the filamentous fungal cell is selected from the species consisting of Aspergillus awamori, Aspergillus foetidus, Aspergillus fumigatus, Aspergillus japonicus, Aspergillus nidulans, Aspergillus niger, Aspergillus oryzae, Bjerkandera adusta, Ceriporiopsis aneirina, Ceriporiopsis caregiea, Ceriporiopsis gilvescens, Ceriporiopsis pannocinta, Ceriporiopsis rivulosa, Ceriporiopsis subrufa, Ceriporiopsis subvermispora, Chrysosporiuminops, Chrysosporiumkeratinophilum, Chrysosporium lucknowense, Chrysosporium merdarium, Chrysosporium pannicola, Chrysosporium queenslandicum, Chrysosporium tropicum, Chrysosporium zonatum, Coprinus cinereus, Coriolus hirsutus, Fusarium bactridioides, Fusarium cerealis, Fusarium crookwellense, Fusarium culmorum, Fusarium graminearum, Fusarium graminum, Fusarium heterosporum, Fusarium negundi, Fusarium oxysporum, Fusarium reticulatum, Fusarium roseum, Fusarium sambucinum, Fusarium sarcochroum, Fusarium sporotrichioides, Fusarium sulphureum, Fusarium torulosum, Fusarium trichothecioides, Fusarium venenatum, Humicola insolens, Humicola lanuginosa, Mucor miehei, Myceliophthora thermophila, Neurospora crassa, Penicillium purpurogenum, Phanerochaete chrysosporium, Phlebia radiata, Pleurotus eryngii, Thielavia terrestris, Trametes villosa, Trametes versicolor, Trichoderma harzianum, Trichoderma koningii, Trichoderma longibrachiatum, Trichoderma reesei, and Trichoderma viride.

84. The host cell of claim 39, wherein one or more further native or endogenous genes of the cell is attenuated, disrupted and/or deleted.

85. The host cell of claim 39, wherein one or more genes of the oripavine acceptor and/or nororipavine acceptor pathway are overexpressed.

86. The cell of claim 39 further genetically modified to provide an increased amount of a substrate for at least one polypeptide of the oripavine acceptor and/or nororipavine acceptor pathway.

87. The host cell of claim 39, further genetically modified to exhibit increased tolerance towards one or more substrates, intermediates, or product molecules from the oripavine acceptor and/or nororipavine acceptor pathway.

88. The host cell of claim 39, wherein the expressed UGT is absent a signal peptide targeting the UGT for secretion.

89. The host cell of claim 39, comprising at least two copies of the genes encoding the UGT and/or any pathway enzymes.

90. The host cell of claim 39, wherein one or more native genes are attenuated, disrupted and/or deleted.

91. The host cell of claim 39, wherein host cell is a yeast strain modified by attenuating, disrupting and/or deleting one or more dehydrogenases or reductases native to the host cell comprised in anyone of SEQ ID NO: 165 or 167 or any of its paralogs or orthologs having at least 70% identity to anyone of SEQ ID NO: 165 or 167.

92. A cell culture, comprising host cell of claim 39 and a growth medium.

93. The method of claim 1 to further comprising:
a) culturing the cell culture of claim 92 at conditions allowing the host cell to produce the oripavine glycoside and/or nororipavine glycoside;
b) optionally deglycosylating the oripavine glycoside and/or nororipavine glycoside into an oripavine aglycone and/or nororipavine aglycone; and
c) optionally recovering and/or isolating the oripavine glycoside and/or nororipavine glycoside and/or the oripavine aglycone and/or nororipavine aglycone.

94. The method of claim 93, further comprising one or more elements selected from:
a) culturing the cell culture in a nutrient growth medium;
b) culturing the cell culture under aerobic or anaerobic conditions c) culturing the cell culture under agitation;
d) culturing the cell culture at a temperature of between 25 to 50° C.;
e) culturing the cell culture at a pH between 3-9;
f) culturing the cell culture for between 10 hours to 30 days;
g) culturing the cell culture under fed-batch, repeated fed-batch, continuous, or semi-continuous conditions; and
h) culturing the cell culture in the presence of an organic solvent to improve the solubility of the BIA aglycone.

95. The method of claim 93, further comprising feeding one or more exogenous oripavine acceptor and/or nororipavine acceptor or precursors thereof and/or glycoside donors to the cell culture.

96. The method of claim 93, wherein the recovering and/or isolation step comprises separating a liquid phase of host cell or cell culture from a solid phase of host cell or cell culture to obtain a supernatant comprising the oripavine glycoside and/or nororipavine glycoside by one or more steps selected from:
a) disrupting the host cell to release intracellular oripavine and/or nororipavine and/or oripavine glycoside and/or nororipavine glycoside into the supernatant;
b) separating the supernatant form the solid phase of the host cell, such as by filtration or gravity separation;
c) contacting the supernatant with one or more adsorbent resins to obtain at least a portion of the produced oripavine glycoside and/or nororipavine glycoside;
d) contacting the supernatant with one or more ion exchange or reversed-phase chromatography columns in order to obtain at least a portion of the oripavine glycoside and/or nororipavine glycoside;
e) extracting the oripavine, nororipavine, oripavine glycoside and/or nororipavine glycoside; and
f) precipitating the oripavine glycoside and/or nororipavine glycoside by crystallization or evaporating the solvent of the liquid phase; and optionally isolating the oripavine glycoside and/or nororipavine glycoside by filtration or gravity separation;
thereby recovering and/or isolating the oripavine glycoside and/or nororipavine glycoside.

97. A fermentation liquid comprising the oripavine glycosides and/or nororipavine glycosides comprised in the cell culture of claim 92.

98. The fermentation liquid of claim 97, wherein at least 50%, such as at least 75%, such as at least 95%, such as at least 99% of the host cells are disrupted.

99. The fermentation liquid of claims 97 to 98, wherein at least 50%, such as at least 75%, such as at least 95%, such as at least 99% of solid cellular material has separated from the liquid.

100. The fermentation liquid of claims 98 to 99, further comprising one or more compounds selected from:
a) precursors or products of the operative biosynthetic pathway producing the oripavine glycoside and/or nororipavine glycoside;
b) supplemental nutrients comprising trace metals, vitamins, salts, yeast nitrogen base, YNB, and/or amino acids; and
wherein the concentration of the oripavine glycoside and/or nororipavine glycoside is at least 1 mg/I liquid.

101. A composition comprising the fermentation liquid of claim 97 and/or the oripavine glycoside and/or nororipavine glycoside of claim 35 and one or more agents, additives and/or excipients.

102. The composition of claim 101, wherein the fermentation liquid and/or the oripavine glycoside and/or nororipavine glycoside have been processed into in a dry solid form.

103. The composition of claim 101, wherein the composition is in a liquid stabilized form.
